United States Patent Application Publication US 2024/0009291 A1 - sequence listing, part 4

SEQ ID NO: 9224 - DNA, 1476 bp, synthetic construct
  source 1..1476: mol_type = other DNA
atgaatggaatcaccatattaatttggataacgatcgtcataattggggtaatcgcctgcatcttggtgaagctgcactacaaagggaatgagctcgagcaagacgaaggctcaatcattccaagcacagacaaattgaacgggatcttgagccagggcaaggaaaagatcaattccaaaaaccttacgaatagtctctcttccaaaaccacccgaacccagaacagccagaataccaagtcactatacggaaacaaacagcacacctcgcaggactatgatgtttacattgtccccgaagtgaacaacaaaaagacgtacgagtatgagtcggagaaccaggttctcatcgattatggcgacaaagtgaagaaatttcaggaacccatcaaacagagccagatggacattatgaatcaaaataaggacgacaaaacagagctgaaagaccttttcacaattgatgagctcatcaaggagtctaagcgcaaagacaacgaacgggagaaagagcagcccaaggtggaggacagtgagctcactgaactgaaggaaagtattgcgaagaaacaggagaatactatcgagaaaagctctagtgaggaagatatcggtgagtttgaaaccatcgagtccctcctgaatgaagaagaactgaatgaggatgaaacaagcgaggagattgaaacatccacaacctcccagaaaactatcgaagaagcaatctcctctgcctcgcaggagaagaaggaggagattgaaaacctgagtgagaacgagaacatcactgatgtcctgcttcatgccgatgacgatcagatggatatacccaatgaggagattaaagagccaactctaaagacgccaacaaaggtcgacgaatcaaacgacagcgaatttaactccccgctgaaggaggacaacgaggaaactatggatctggactatcgcaaggatctggacaagtttacacaaaagattaaaggcagcaagctcttcaaggacgtgaaggaaaaactgaccgctgagccagaggagtacattgaggagggaatccccaaggacgagacttacattaggaacgtgaaggaatacgatgacttcgagccgattatcaacgagacccatgccgattatgtcgaccctattggagacatcgaacctgcattcgaggataaccagtcactgaagctggaaaacaaacctaaggctttcgaggtgatcaaggatagctcaaagcctgaagtgacccagcaaaagatccccaccatcaagagtaaacctagcaggaacaacataaagataaagctgaataacaatgaagtggtacttaagaaaggcgacgaaatcatcttcaatcacttaggtgagacgtactccagccaagtttacgccattaacggggatgacatctccgtgaagtacagacggcagaatatcataatcaaaccagcggatgtgaagaagatatattga

SEQ ID NO: 9225 - DNA, 1230 bp, synthetic construct
  source 1..1230: mol_type = other DNA
atggttgtgaaaatcaatgaaaattaccttaagctaaagagcagttacctctttgtggaagtcgctagacgagaggcggaatttgtcaagaacaatcctgacgtggacgtcatcaagatgggtataggggatgtgacaaagccattagtgccatctgttgttaaggccttcaaggacgcggtggatgagatgggaagtgccgacacgttcatgggctacggcccggaacaggggtatgagtttttggcagaagccattgtgaaggattatgagaagtatggaataacccttgatacaagcgagattttcatcagtgacggggctaaatgtgacaccggcaatattcaggaaattttcggcatagacaacaaaatcgccgtaaccgacccagtctacaccgtgtacgtggatacaaacgtgatggctggcagaaccggtgaaatgaacgacgggatgtacgaggggttgacgtacctcaaatgcaacgccgaaaacggatttgtgccagaactgcccagcgagcccgtcgacatcatctatctgtgttatcctaacaatccaaccggtaccacactcactaaagatcagctgaaggtgtttgtcgattacgcccgggagaacaaagctattattctgtttgacgctgcgtacgaggccttcatcaacgaggaaaacgtgccccacagcatctacgagattgaaggtgccgaggaggtagctatcgagtttaagtccttctccaaaacggcgggcttcactggaactcgctgcgccttcacagtcgtgcctaaacagctgaccgcatacgactcagagggcaacgaggtagaggttaaccccctgtggaatcgcaggcaaaccaccaagtttaacggtgtttcctatccggtgcagaaagccgcccaggcaacctattccatcgaagggcagaaggagatccaagaggtcatagattattacatggaaaatgcaaaggtgatttgcgagagcttgtccaacctcggactggaggtctacgggggaatcaattcaccttacatctgggtaaaggctcccaataacatggactcatggactttcttcgatctgctgctaaatgaagccaacgtgattggaacacctgggtctggcttcggccccagcggcgaaggctatctcaggcttacggcattcaatacactggagaacactaaggaggcaatggaccggatctcgaaactggagttttga

SEQ ID NO: 9226 - DNA, 693 bp, synthetic construct
  source 1..693: mol_type = other DNA
ctgaagaagatagagaaacccgtagagattgaggacggggatagctttaaggttatccttagtaaatacggggcactggcactcgacaagcaagaaaacttagctgagctaattggcgaaaccattggggacctcgatatcgaaaatgaggtgattagcttcgacgatattaagatgccaatccacgtgctgggcttttacagccaggacctgaatcagtggtcctgggcctgggactgtgaagagatattcggcaataacctcatcgcctcggccgtggaaattaaaaaacttggagataagtttgacgtccctgaatttaattcctcactgatcaaaacagatttcaacttttgccatacaatcgcaatgaccgccactaccatcctgggattcgacggctattacgccgttagtgaggatggtctggacatctttgtggctatcgaatccgacctggtgaaggagaacaacgatgtcaaaaagttcagagacactttctatacgttccagaagaacttcaacatatttcccaaaattgccttcgagtcatacaccaagctcaagggatacgggttcaaaccgcaggatggcttttatttggcgaagatcggcgagagccgcgtgatggcggggttcacggaaaggggaaatgtcacacggatcttgatgttcggtgaggacgagcagtga

SEQ ID NO: 9227 - DNA, 612 bp, synthetic construct
  source 1..612: mol_type = other DNA
atgaactccgatattatgaaccaggatctggtcgacgaactagagtacatggaggagctcctcaccaagtccggcttttttgacagcgaagagatactggagatactggaagaccagttcatcgatgaggacatcgacatttctcagtattccgtgagctcaaatgattttagcaatgagaacttctcaaaactggaaaacgcctttacgaacttagcaagtgagaaaattgtcgctatccacaattgtggctacgacatcagtgagggggtaaacgacgcctttgagctttacgttcatttgcacaacaacaaattctccgtggaaggcttcagcttttatacttttgaggacatcgaggaaagcatctgcgagtgcaagctgaagatcaccttcggtgacttcgagaacaacgaggaaatggcactgaaaatcggaaaaatagtgttcaaatatctcaaggaagaaaatttcaatatcgcctgggatgggacaattaacaatcaaatcgagatttaccccttcaagtgggataagtcgtatgacagcgaaaaggaatacgaaattgagggagcgtacgaggtgttcatcaagaatcaggtgcttaagtga

SEQ ID NO: 9228 - DNA, 585 bp, synthetic construct
  source 1..585: mol_type = other DNA
atgaacaccagaagcctcaaactaattcgcgaggtgatgatcaactcagggaagtggtccagtatcgaaatatcacaggattccatttacctgcagttcagggacgtggaactgggaactcccaaaatcgatgaagacttttctctggttgtcaggttcgcggacgacagctttttcacagtcttctacaataacatttgggacatcgactttctgtccaagtatgattttaaaaaccagctgctgagtgaggaggtaagcttcaacattaaggacatcaaattcatcgatttcgagtacctcaacacatttttcaccaattacaaaaaggagaagtccgtcagcgtggtggaggactttaatatccacaatattcgcaatgactttttcatgttgcttgagacggatgaaatagccatcgtggttggcggcaaccaaatggatttcttcagccctttcgagcggctcgatgacgcatcgcttcgtgaactgagcaatgattggatgttatattttctgcggtatcatcagaagagaaacatagtgcgagacccgatgtgcgagaaccacccattgaagctctga

SEQ ID NO: 9229 - DNA, 1023 bp, synthetic construct
  source 1..1023: mol_type = other DNA
atgacgtgcaacattctcgtgggtggagcttggggggacgaaggcaagggcaagtgcatcacctacctctgtgacaacgataagcccgacatcatagcccgggccggagtggggcctaacgcagggcactccgtggaatttaacggagagaagtatggcctgcgcttaactccctccggtttcgtccataccggcgctaagctcatgatcggagcgggcgtcctagtgaacccggatgtgctgtttaaagaatttgaggacctgaagaaatacaacgtaaaagagcgcatgtgcattgactcgcgatgcgccatcatcaatgaggagcacatgactagggataaagggtcagagcatctggctaagaagatagggagcaccggaagtggttgtggcccagcaaactccgacagagtgctaagaaccatagaattggctcgtgacatccctgagcttgaagattacatcaccgatgtgagcctggaatgcaatgaggccattgacgaggggaaggacgtctttatcgaaggaagccagggcttcgccctgtcactctattatggcagctatccctatgtgaccagtaaggacaccacggcctctacattcgcggcggatgttggggttggaccaactaaagtagatgaggtcatcaatgtgttcaaatcctacattagccgggtcggggaaggccccttccctaccgagatgacacagaaggaggctgaaagtcacggctgggaggaatacggcgtggtaacaggacggcgaagaaggattggctacttcgatatggaccttgccaaagaatcttgcaggattaatggtgcaacccagatcgccctgacgtgtgtggataaactgtaccccgactgtgcacgcacacaagactacgatgagctgagcgccgagactaaggccttcatcgacgacatccagtccgcaactggtgttccagtcacgatcatttcaacagggccggatttgaaggacacaatagatctccggaaagagcttctgtga

SEQ ID NO: 9230 - DNA, 495 bp, synthetic construct
  source 1..495: mol_type = other DNA
atgtatatccggaaggccacactggatgatctctcgaaaatcatgagcatttacaagatcgcccaggatttcatgatcgagagcggaaaccccaaccagtggggccataacaacccttcagaagaaaaggtgaaggaggacatagacaaaaaaaatagctacctagtctgcaacggggaggacattcacggggtgttcgtgattttcaaaggtattgagcccacttataagcacattgagaatgggagatggcttaacgaagacgagtacatcaccatccaccggatcgcttccgacggcacccagaagggaatttttaagttcctgatcgactactgtaaaagtaaatccgaaaatattaggatcgatacgcaccacgacaataagataatgcagaagctcatagagcgaaacggatttcaaaagtgcggcaggatctacgtaacagatggctctccgcgcatcgcatatcagtggatgaatccactgcattga

SEQ ID NO: 9231 - DNA, 603 bp, synthetic construct
  source 1..603: mol_type = other DNA
atgactgatcaatatatgaagccgcatggcgaggaaggactgcagacaattaaaaatatgaatgaaaaccacaagaacatctctgagtttgccttcaaatgcgccattatcggagacaacgacaagattctagacgccggctgtggcgggggggtgaacatcgaaaaattcctcaagataacaaaaaacaacgtggacggtctggattacagcgagatcgccgtaaccgagtccatcaagcggaaccagaaggcgatcgatgatggacgctgccggatcatccaggcagatgtgagcaatatgccattcaaggacgagtgctatgactttatatccgcattcgagaccatatatttctggcccaacctggaggaaacctttaaggaagtttcacgaatcatcaaaccaaatgggcagttcatgattgctcaggagacagacggcaataatcctaacgacgaaacgtgggtgaacactgtcgagggcatgagaatttacaccgctcccgagttggaaaagtacctccttaatgccggtttcaggagtgtggaggtctttaaaaaagaggatgaatacattctggtcgtgatcgggaagaagtga

SEQ ID NO: 9232 - DNA, 939 bp, synthetic construct
  source 1..939: mol_type = other DNA
atggacaaaaagatcatcgcaatcattgttgccttcatcgccattgtcgcgatcggaggatatttcctcctgggcggtggcagtgacaatgtcactatagggtacttgccatctgaccacgacgcggccctgtttgtggctgacgcccaggggcaatacgccaagaatggaattaacaccaagctggtgcagtttaacaacggcggggacctgatgaccgctatggctagcggggaggttgacgtgggctatgtcggaatcacccctgtccttagctcaattgagaaaggagtgcccgtaaaagtcatcagcgccgcacaaaccgaggggtccggcattgtggtggctaagaacagcggcatcaactctgtcttcgacttggagggcaagaagatagccacaccaggtgaagcatccatccagcacatgctgctgcagtactacctgaagcagaatggtatcgatattaaggatgtgaaagtctctgccatgaaagtcccttcaatgaatgatgccctgaaaacaaataacatcgatgggatgatcacgtttgagccatacgtaagcattgcggagaagaacggggcaaaggtgctcgtggactcctccgaaatactgccgaatcatccgtgctgtgttgttgtggcttccgataagttccttgacgaacatcccaatgagacgcagaagatcctcgatattcacaagaacgcaaccgattatatcaacaataacactgacgaagctgccgaattactccccagtgatatcgtgagcgacgtggacgtggagaaacaggcacttgccggattccccttcatttcgggtctaaatgacacatacaagcagaacgtaatggagttcatgaacttggaagtggagctgggcgtgctcaagaaacctctatcagaagataaaatattttggaacggcagttga

SEQ ID NO: 9233 - DNA, 1407 bp, synthetic construct
  source 1..1407: mol_type = other DNA
atggagttgataaacctgagtaagatctccagtgaggaaatcctcgcaggttccttcggcatagagtgggaaagtctgcgtgtcaaaagcaacggggaactggccctgactccccaccctagcgtttttggggataagctcaagaatcctgttgtgacaaccgacttttcagaaagccaggtagaaatcataacccctgcttttgacaccgtcgacgaggcttttgacactttctcggccttaagcgacgtggtgaactcatcccttcccgagggtgagtatctgtggttccagtccctcccctgcattctgccatccccaaaccagattccaatcgcccagtacagccaggaaggggaggagtcccagaagtaccgggaaaacctggccagcaagtacggcgttaagaagcagctgatctcaggcgtgcactttaacttcagcttcgacgacggattcattgagaagcttaggaaaattacaaaatctgatttgtcatttcgacaatttagggatgagatctacctaaagatcactagaaactacctcagatactgctggctgataatttatttaaccggttgctccatcggagcccacgagtcgttctcatctgagtgcatcaacctcatggatatgcaggatggcttcggagggtattacagcacaaagggacccagctttcggaatgcgagctccggatacaagaatcttaagaagctgtatccaagttacaatagtatctctgagttcactcgcgacgtaacgaacttcattgataatggcgacctgagcgaagctaaggaactgtacacacaaatccgcttaaaacctaaaaatcccagcgatgtcctcaactctctgaacgagaccggaattgagtatatcgaaatccggacgttggacattaatccattttataaatgtgggctggtgaagcacgacatgaagttcctgcatctgttcttgatttacatgtttgtgaaaaacgagtcggactacccggactggcaaagggaggctaacatcaacgaggaaagagtcgcggagagagcattcgatgaaagcatgcgactactgaaagacggcaatgaggtcacccttaaagaatgggcctatgacctcatcaatgagatgtacggcatgtgtgatgtgtttgatatcaacgagtataacacactgaagttgatgcatgatcgggtgttgaatcccgaactaaccccgggcaaaaagctgctcaaactcatcaaacgcgacgggttcattaatgcacacatgttctccgcaatcacccataaacagacgagtaagaacctgattaagaatgtggataaggaggaatacggccgcctgaaaaagtatctcaacatagccctttacaggaaaaagtccgacaagaacagctga

SEQ ID NO: 9234 - DNA, 1047 bp, synthetic construct
  source 1..1047: mol_type = other DNA
ctccggcaatacatctacaacaatgtgcccaacattaagtattataatgagtttaaactgattgatggtgaaaagatgaataaaaaaattacattcgttctcgtgtttgcactagccgcatgtctggctatgggctcagcgagtgctggtcttttcgactttcttggagggggagacgacacggtcaagataggctacctgccctccgatcacgatgcagcactttttgtggccgatgctaagggcatgtacaaggataacaacatcacaacagagctggtgcagttcaacaacggcggggacttgatgacggccatggcgagtggggaagtggacgtcggatatgttggaatcacccccgtgctctctagcattgagaagaacgtccccgtcaaagttatttcttccgctcagactgagggtagcggcatcgtggtcacagatgactccggaatcaagtcaccggctgatctgaagggaaagaccattgcaacgcccggggaggcctctatccaacatgccttactcgtgtactacttgaaccagagcgacttaaccgtggatgacctgaatgtttcggcaatgaaagtgccttccatgaatgacgcgctgaagaccgggcagatcgatggcatagtcactttccagccttatgtgtccatcgctgccaatcagagcaacgcccacatactcgaaaactcaagcgaaatactaccaaaccatccatgctgcgtggtggtagcgtccgacgatttcatcaaaaaccacgaggaccaggctaagactatcgtcaagatccacgagaatgccaccaagttcatcaatgacaatgtgaaggccggcaacgccgacaaaattgtaaaactcctgcctgaggacattgtcagtgatgccaacttggaagccgactcgctggctagtttcccatttattagcggcatcgataatgacttcaaggccgatgtggacgagtttcaagccctggaagtaagcatcgggctgctgaacaacaccatcccgcaggacaaaatatactgggaggcatga

SEQ ID NO: 9235 - DNA, 627 bp, synthetic construct
  source 1..627: mol_type = other DNA
atgaaatttgacttatccgaaatcggaattaaatccggcctccaatatgaatgcatcaccacaaccgttaacaaagagggcgtgaaaaatgccggggcgttcgccttcgaatatctgggtgatgacaaggtaaagtgccacatctttgaggggagtaagactctgaaaaatatcctcgacactaacgagtatgtcgtgaacataacacagaaccccctagtgttcacctacgctaccttggactgtctgggcgatgaatattacaccgacgacgagagcatcgccatcattaaaaacacgccagcttacattattgtggatgtcgaaaacgtggaaattaagacacctgagaatttcccgatcaaaggggatagcaacatctactttatctacggcaagatcaggaagcttgtcgtaaacgatgaacgggccgccgcattcaatcgaggaatgagtgcgctgatcgagagcctggtgaacttttcgagatacaaaatagtcgacgaggagaagcgcaaagagtatatggacaagctcattgagaatcagcgggttataaataaggtgtcagacgaaaagacgaagaaggcaatttccgatctgaagtctgagtacgagaagtactga

SEQ ID NO: 9236 - DNA, 375 bp, synthetic construct
  source 1..375: mol_type = other DNA
atggacggcgaaattgacctcgagctgtatacaatcagtattattaggcttaattccatcttccagaagatcgaggataaaaagatagtcaccgatatcatctctgatataaacgattgctttaacgacctgaaccagatttacgaagacattttgaacgagctctccaaagaagaaatcaacatcaatgagtatgacccatttttcgagaacggaatggtaatgtttcccgagtacaccaagagcattgatgaaacgataggcaaaatcgacgacgagaacctaaaggtggccctcaatagcctgtcagacctgttcgtgaagctgatcaaagtggggaatgagtacttcgagaagcggggtgcattcaagtga

SEQ ID NO: 9237 - DNA, 2097 bp, synthetic construct
  source 1..2097: mol_type = other DNA
atggtggacctcaacaagatgtttaaacctgaatctgtggctgtgattggcgccagcaatactccaggcaaggtgggctacattatcgtggacaatctgattaatgacggctttaagggtgagatatatcccatcaacccgaaagggggagagatcctaggtaaaaaggcctatgcgaatatagaggacgtgcctggcaaggtcgacctggccataattactatcccctcggtctttgtcaatgccgttgttaaagagtgcggcgaagcgggtgtggaacatatggtagtgattacggcggggttcaaggaggtcggcgatgagggggctaaattagaggccgagctcaccgcaatcggcaaagagtatggcatcaacataatcggaccaaacagcctggggatcaccgattcccacactcccatgaacggatcattctcacaaatgatgcccccaacgggcaatatggctttcatctcacagagcggcgccatgatggtagctatcattgactggagtgtcacctccggaatcggattcagcaaggtgatcagtctagggaacaaggcgggcgtaaatgagatcgagctcctgcagtacctggcagatgatgacgaaacgaaagttatcatctgttacctggaatctatttctgagaacgaagacttcgtgaggaccatgcgggaaaccgcccgaaagaagcccattatcatactgaaatccgggagcagctccgcaggagccgccgccgcctcttcccacaccggagcactggcaggcagtgacctggcctttgacaccgccttccgccaatccggaatcatcagagtggacactatggcggagctgttcgatctgggtcttgctttcagcaaggcccccctcccacgaggagaccacgtcgccatcattacaaatgcggggggaggaggcgtcgtgaccgtcgacgccatggagaaggcaggcctcaagctcgttcagttcgacgaggagacaactgaacggctgaaaaagtgcgtgacagaggaggggagcgctaaaaatcctatcgacgttctgggcgacgcgcccgtcagccggtacaaggaatccttggagattgtgttgagtcaggatgaggtggactccttgattgtgatggtgtgtcctacagcttctgcagacccagatggcatcgccaatgccatccttgaggaaaggaaggagtttgataaaccgatcattgtcgtgaacatgggcggtccctcattcgagaaagctaacgatgctctgcgcgaaaatggtgtgccaacatacgtattccctgagaccgctgtcaccgccctcaaggccatgacagattatgcaaagctcgaagacaagtcatatgatgatgttgtggagaacatagatgacgtggacaaagatgcggtcaaggccatctttgagaaagtgaaagccgatggcagagacacgttgctggggagtgaggcctatgctgtggctgaggcatacggcatttcggctgcacccataaagctatctacaaacgccgaagaagcggcttccctggccgaagagatggagtttcctgtggtgcttaagatcgcatccgataagatactgcataagtcagatatagggggtgtcaaggtcggaatcagcagcgctgaggaggccaaaagcacatacgatgagattatcgcaaacgcaaaggcagcccaccccgacatcatccctgacggcgtagaagtgcagaagatgatggactctggggaagaagtgattgttggtatgatccgtgatgagcagtttggaccgatgattgcctttggtatgggggggatctacgtgaaccttatcgaagatgttagcttcaacctcgctaaagggatgagttcgcaagaaattgacgagcagatcaacaccaccaaggtatctcagttgcttgccggatacaggggcgaggcagcttgcgacgttgaggaagtgaaggaagccattaaacgcgtcgccagactcactctggacttcccagaaatatccgagctggacattaacccgatcttcgtgtacgaagaagggagcagtgctctggatattaagattaaattatga

SEQ ID NO: 9238 - DNA, 921 bp, synthetic construct
  source 1..921: mol_type = other DNA
atgagcctgattattgcttacatagggaagaagggctgtgtaatggcggctgacaagagacggataggatattttggtgacaagaagaacttagacctcctggaggaagaactgtatgagggaagcatcggaaatgatgaagaatttctggcccgagcttccgaacttggcatctcaattaagatcaccgacgacgcaaacaagctcaagaccgtgggaaactgtattcggggtgaggtcagtacaaagggcacactggagacgaagcgcagaaggatctacggcacaacgaacggttaccagatcatcgaactactcgggtcggataccaagtcacgtaatgccggggagaacggcattgtgatctttggtaataatttcgccaaacaacttgcccacaacttgataagcaagaaactcaaggggtccaagagtctgaggtacatgggcgaggtgtttgaagacatactcaaagaagtgtcctctaaaactcccaccgtcggaaagaacattgacgttttgatgcagcagccggatttcaataaaaccgaggcccagaagcacctgaacctcacaatcgatcacgacatcaaagtcctgactaaattccgccaggagctgaccgagcagattgtccaacagagcatcgagattgaaatggccaataaaattatcaacaaaggcagcgtaggccatgtggtcaatgtggatggaaacatgctcttcatccagctgaatgacaaaactcaagcgatggacgggaactggaagcagttggcagcaccaggccagaacgtgctgatgttcagtgaaagctccaacgtggagatcggggatgaggttgtgatcgagaatgaggagctgtgcctaaaaaaggataagtcctctcttaaatgcgacataatcttatgctcactgtga

SEQ ID NO: 9239 - DNA, 924 bp, synthetic construct
  source 1..924: mol_type = other DNA
atgaaaatcacattcctcggaagtggagggggacgattctccagcatctctcagcgacggatgaccggcgggtttagaatcgataatcttggcggtaagaattaccacatagatcccggcccgggggccctggtcagaacataccagtttgggttcgaccctcgcaatctaagtggcatttttgtgtcccacgcacatacagatcattataatgatgcggaaattctgatcgaggctatgaccaagggcatgacgaagaacaatgggaccatcctcggaagtgtgagtgtgctggacggctacaagaaatggggtccatgtatttcaaaataccatcagagcaagtcacggaccgtcatactcgagcccggcgagactaacgaatttgatagcatcaaggtcaagggcactaaaacccagcatggcgaccctgttggctccggatttcaaatcgactacaacggattcaaaatttcttatacgtccgataccggctatttcgacggacttgctaaggaccacgagggggcagacattctgatcgccagcgtactgaggcccggcgagaaatcaattccaggacacatgtgctcacgtaacttcatcgacttgatcgaagaagtgaaacctaaggtggccgtcatgacccacctgggtctgaaaatgatatccaataaccccgtggtggaggccaagaagatctccaaaaagacgggggtgaagacaatagccgcgtttgacgggctgagcttcaacatcaactacaataatccaagaaaattcaggctcatttcgctgaaggatgttgaatctagcatgcacagcacaagccacagtttattcaacagcggtaggcgcaactcgtatcagacttcttttcgcaacaaggagttcgacgagttgtccatcgtaaagcggaactga

SEQ ID NO: 9240 - DNA, 1101 bp, synthetic construct
  source 1..1101: mol_type = other DNA
atgagcaatagcatcggagaaaagtttaaaataacctccttcgggtcaagccacggcttcggtgtgggcgccattgttgacggatgtccggcaaacctgaagcttacaacagaggacatccagaaggagctcaacaaacggaaacccggcacaagcagcgtgaccacccctaggaaggaaaatgacgaagtgcagattctatctgggatctttgaaggcaaaactgatggcacgcccatcacgggcatcatcttcaacaaaaaccagcattcgaaagattattccatgttcaagaacacgccacgacctagtcacggggattacagttggatggtgaagtacggaaactatgactacaacggcggcggtcggggtagtggaagagtgactatcggacacgtgattggtggagcgatagctaagaagctcttaaaaacccaaaagatcgagattatatcccatgtcgtccaaattggcgatatcaaagcaaagccccaggactacagcacaatcaagaaaaacattgagaagaatccaatcaggtgcggggacttgaaagcttccaaggagatggaagagtttattctgtctaagaagcaggaaggggactctgttggcgggatcgtcgagacaatcgccatcggcgtgccacaggggcttggagagccggtcttcgaaagactggatggtgatctggcccggatattgatgaacattggatcagtgaaaggggtggaaatcggcctgggctttgacgtagccactcacactgggtctgagataaatgacgagtatcagatcacgaataacaagataaccaccaagacaaacaattcgggtgggatcatcgggggaatgagtaacggaatgcccatcacctcaaggattgcagttaaacctaccccctccatttccaaatgccagaatagcattaatctcgagaagatggagaacgaaaagatagagattaagggccgtcacgacccatgcatctgtcctcgcgtaaccgtcgtggccgagtcatccactgcgatcgtgctggccgaccatatgattcgcagcggcttcatccaccccaccaatctggataagagtatttga

SEQ ID NO: 9241 - DNA, 2628 bp, synthetic construct
  source 1..2628: mol_type = other DNA
atgaagcggcatggactgttcattctgatcctcctaattgtggtcctcgctatcatgaacagcgcctcggctgaaaattcgagcgccgatttgatttcagatacgcagtacgagaacagtgtggatattgatgtggctgacgataacctgaagtcctaccagagcgtcagctctgatctggaggataataacgaggtatacaatctgaaattgaacgataacagccaggtggacaacacatttctcaaggataacgccagcgtctctgactccaagatatataaactcgggtatgatgttacacacgttgctgataagctccttaatttcagctctgcggacgacatcttggtcatcacaacggcagggatggcttggattgacaacaagaccacggaatccgctttaggcgggatagtcgatgcctcaaacaattacgttagttatggaaaaggcaatatcctcacactctcctccaccaggaacgatcctactaatatcgccttttttattaagaaagacaactcccttaccatggcattctataaaaacggctcgctgactcctattttccacggcaatgcaggtccaacactctccgccggggagtggaagaagctacaaaaagctctgggggatgaggatgcctacagctacattagtatagccaacgcctggagcgccggaatgcccaatgatgtgctgacgcaagccacctatcatggacacgtgtgcaccggcctgataagtggccaggccatgattcaaaccctgctgacttactaccccccaaaggacgaatttggcctccccctggagcatacagcatactatgtccttggcgtgccgggcggatctgaggacgacgccttcacatggtcactggacattactccaggcaaaagggcgtacatcgggattgacaccatggttaataaggccatgactggcttcatccgatggaataccacttcaaacaccggaattatcatcataatgagctataatgagactgccataaaggaaagcttcaaaaaggtgtctggtctgaatcctgacgcctccgcaacgaatgacttgaagtaccagaattggcttatcagtaccctgcacaccaacccaacctccctggtcacaatactgtacgagtttaaaggacttactaaggacaatctggagtacctgatgggcttggaaatcggtaaggggaacgtggtgaagtccgctcatgggttggacatgaattatatcctgggactgaacttaaccaaagccaaccgtgaggcgaacgtgaacatcgctgaaataaagcttagcgatgctaaattgaagcagatcgggatcgacgcgtgcaacaatgccattgagtattttagtagccagggcatcaccattagcaaagatctcaataacctctacgtgcttacttctgcgggctatgttcgcatcaacggtacgcccacctccatggtctttgatggtatttacgaggtcctcggttcagcactatacaagaaaacactcttcccagtgcacacgccgatttggaaagacttagtgtttgacttctactgggtagaccccaacaatgtgacaaatgattcgagctttagtctgaagtatgacgtggctaaagatgagctgatcgtgatcggcaacaccaccaggaatgcaaactacatcctgcagaatgccatcaaatatgaccctccatacgatgtcctcatcggatggctgttccacaaccacgtatgcgggggaagtgctcctgggtacctgatcgctgactacatctatgagaacttccccaccaacgaaaatgagtcatatatctacctgacaactaatgcgaactgtaaggacgacgtgatttcaagagtgctgggtgtaagccccggtatggggacatattataatctcagatatgacaacaacaagaccaactccacaaatgttggcatcgcaatcaaatggaacagcaagaccaagactggagagctcatcattatcaatcttgacaactgggggagcggcgcgatattcaagaaaggctcaaatatgtacgaggaatacatcaaactatacaaaaaggactactccagcccaaacctgatctcccggccgcagatttcaataacagcccggaaagaaatcaacgaggaaatgctgaacaagattattggaggagccacggataccaaggaaggcaattcgattgcatatatcatgaacctgcccgacaagcttcctattaacaatggcgagaacaacaacaaaaaggacaacaagaaaaccaagataaccgggaacaaaaagaaaacggacggcaagcacatcaataacagctcctcaagctccaactctatcgactcgaacagtcctacaaccggaacttacggaaagtccaatgcagggctatccgtcggcattagcaagaacatcatcaatgcaaatagcaactctgaaagttccgacgagagttctggtgatggaaagacttatgaaataagcaagaagagtcccaataaaaaaatcaactcaaacaatgccatcttcgccatcttagccgtgctggtgttgggcggtattgttgggtacgggtacattcgcaagaaccgcggcaagtga

SEQ ID NO: 9242 - DNA, 480 bp, synthetic construct
  source 1..480: mol_type = other DNA
gtgatttcaacggttcttagcgtatcttatgcacaccccggacatggccactacgtcgatgagatcacatctgaggacgtgggccacagtaaccacccgtccagcgactcccatgacagttccgggaaggagctgtccagtaaaagctcatcaaatagcaggatcgcctcttctcacagtaactcgaaatcaaacaaggtctccagctcggatacctccaacagcgacctctccaacaaacacacgtccagccagagcattaagagttcaaagggtgatgtggagcctatcaattctcagaacgaggaaatgccaaataatacccaagtcaagaatacaagcaatataactaaccatacaatcaccgaagaagccgaaaataccaacttgctgactcagagcaacatactgctcttcattctggtggctatcgttgggttctgcatcgtggtgctatttgacaagttcaaaaaccggtga

SEQ ID NO: 9243 - DNA, 1005 bp, synthetic construct
  source 1..1005: mol_type = other DNA
atggaatttccaaccacccgactgaggaggcttagaaagaacgccaagattcgagatatcgttcgggagacgaagctcctaaaggaagacctgatctatcccatctacttcaaagaggaccttcagggcctggagaaggaagagatcagctcccttcccggggaatttaggtactcgctcgacagtggggtggagtttgctaaggaactggagtcaaaaggcttaaagagcattattgtcttcggaataccgaaggaagaaactaaagatgaaatcgcctccccagactacagcgctacagggatcgtgcagaaagcgatcagacgcctgaagaacgagaccaatctggttatcattagtgatgtgtgcctgtgccaatacacatctcacgggcactgtggcttgatcaaggagaacgaggacacggatgacggcattgaaatcttgaacgacgagagtctaccttacatcgcaaaagtggcactctctcacgctgaggccggtgccgatatcgttgcccctagcgacatgatggatgggcgcataaaatccattcgggagactcttgacgagaacggatattataatgtcatgataatggcctactccgcaaagtacgcctcagccttttatgaacccttccgcgtggcagcttgcagctccccacatctcggagataggaaatcttaccagatggaccccggcaacgctgtggaggctatccgcgagtgtgagctggacgtcgtcgaaggttgcgacttcctgatggtcaaacccgccctcccatacctggatgtagtgcggatggtgcgggatgagttcatgttgcctttagtggcctataatgtaagcggagagtacgcaatgattatggccgcgattgagaagggcttcctgacagaacgtgcgatcaccgaatcgttgctctcaattaagagagctggcgcagacctgataatcaccaacttcgccccgtatctgctcctgaatgacgtgatagagtga

SEQ ID NO: 9244 - DNA, 882 bp, synthetic construct
  source 1..882: mol_type = other DNA
atgaatgcctccgaaatcgctaagatcgcccagattgcctcagcactggaagtaagcggatacccaaagcctggcaatgtgcaccgcatacgagattacgacgacatggagttcgaggacttcgtcatcagtggcatcgtcatcggcgacactattcgggaagcatgcgacgacgtagatgtgaaaaacccaaagctgggcaaatacatccttcaagcagtgtccgaaaccgataaatggatcaaaaacaacaccaaccttggcattgtcatgatgataattccaattgccgtggcggcggccataagtaacagctttgacgagattcgcgataacataaaagtcctgatgaagaacactagcgttgacgacgcttgtgatctgtatgatgcaatcaacatcgccgacgcaggggggatgggggaccaggacgaatacgatgtggctagtgataacgcgaaaaagggactgaaggagaataaacagacaatgtacgacgtgctcaaaatctcagctccctgggacatgctggctcgggagatgacctcggatatgcccgctgtgttcgagatcggttatcctacgtatcatgagctctctaaaaagaagtctaagaacgagacgtgcatcctcaccttcttaacattgctctcccaggttcccgataccctgatctccagaaagtatggttccgacgaggccctaaagatctcaatgatgactagggacctgcttaacctgaagaatgagagcgactttaaggataagctaaaggaatttgacgatttcctcttcaaaaataagtacaatccgggaacaacagccgacctgaccgccgccagcatttttgtgagctacttgaaagataatttcatgatttga

SEQ ID NO: 9245 - DNA, 324 bp, synthetic construct
  source 1..324: mol_type = other DNA
atggaaattgagtataataaacacgctacatatccgcccctcatcgaggacctagtcaacgaactgctgaaggatgattttgtgcactttaagatcctttgcgccaacgaagtgcaccattttaataaaagcgacaacagcatcataaagttcgagaccacatatgtaaaggagacctgtgaaaacggcgatatgctctacattgcatacccagacattttccgggtgaaactgtacagggacgcgacgcagtacatcaaggacaaagagaagatcgatgccttcaacgacgtcgactggactgggaatcgcatcatattctga

SEQ ID NO: 9246 - DNA, 1545 bp, synthetic construct
  source 1..1545: mol_type = other DNA
atgagtgaggacattaagaaaaccatcaatgaactgcatatctacgaaaaaaagctgctgaaagaactggaagccagcgccaacgccaaccccgagaagatagctgagaagaccggcatggatattaaggcagtcatgagtgccgccggatcgcttgcatcaaaagatatcattgaagtagacaaggaggttgaggaggtcatctccctgtctgatgtgggtctggaatttgtgcaggacaaactgccagagcggaaaattcttgacgttctcattgaaaagaaggagatacacatgaaggatctcacggatatttccggcctggacaagaaggagtccaatatagctattggttggctccgccggaaaaactgggctcagatcgataaaggcgtagtgaaactgacggatgacggcatcgccttcaaagacaaactaggcgatgatgaagaactgctgaatatcctatctgagaccaagaacatcataaaggagaacctctccggcgatttaattgacggatttaataagctgaatgagcgcaagaatatcctcaacattaaaaagaacacctcacacagcttcaagctgctggacaaaggtgaagcaatactcaagcagggattcacgattcaaaagcaggcgacccaacttacacaccagcaactgaaggacggggaatggaagaacttgcagtaccgaccttacgatatcaacgccgaagcacccatcgtgtttgccgggaagaaacatcctttaagggtgatcattgacgaaatcagagagatcttcctgaacatgggattcagcgaggacaatggtcaatatgtagagtcagctttttggaacttcgactcccttttccagccacaggatcacgcggctcgggagatgcaggacacattctacctcaagaacccattgacttgtgacctgcccgatatggatttggtcaaacgcacggccgagacccacgagactggggccggcacaggttccgttggctggcagtacgattggagcgaagacattgcacgccagagtgtgctgagaacccacacaacaggaatctcgacaaagcatctctttgagcatgagcccccaatcaaaatgttttctgtggggcgagtgtttcgacgggaaactttcgactataagcacctgcctgagtttcaccaggtggagggccttgtctgcgacgagggaataagcttccagaatctcctgggaactttgaaggaattttataagaagctcggctttgaggtcagattccgcccggcctacttcccttacacttatttgagcaccgagaccgagatctacttggaggaaaaagagagttggatcgagctaggaggggcggggatgttcaggccagaagtgctaaaaccgctcggcatcaaccagcccgccctggctttcgggctggggatcgaaaggctggcaatgatcagatatgacgtggaggacatccggatgctttacaagagcgacattaaatggctccgtgagttacccattgacaggggcgtcgaactgtga

SEQ ID NO: 9247 - DNA, 774 bp, synthetic construct
  source 1..774: mol_type = other DNA
atgtcaatcaagctagtgagctggaacgttaatggcattagggccctcagcaagaaggaggagttttgggagtggttcgacaatactgacgcagatatcatcaactttcaagaagtacgctccacaaaggaacagatcccagagaaactggccgatgtcgagggatttcataaatcctttaatgaggccgaaaagaaagggtacagtggagtcggcacttactctaagatcgagccggtggacgtggtgaaaggtctcggtattgaggaactggacggggaaggacgggtgctgagaatcgagtaccctaactttattctgtataacatctacttccctaacagcggcacgggcgcgaaaaggctggactttaaggttgagttctgtaacgcattactgaaacagattgtggacctgaaaaacaaggggaaaaatgtcgtggtgaccggagactacaacattgctcacaatccaatagacgtctacaaccccaagaattgcgaaggcaagtcaggatacttgcccgaggaacgtagttggttggacgaacttgaaaacgccgggttcgttgatacattcaggatgttcgatgagggggaaaataacttcacctggtggtcctatagaacccgggcccgggagcgaaatgcgggctggcgccttgattatttctatgtaaacgaggaaataaagggcaatgtcaagtcggctaagatcctgaacgaggtgttcggtagcgaccactgccccgtgaccctcgagctcgatttctga

SEQ ID NO: 9248 - DNA, 696 bp, synthetic construct
  source 1..696: mol_type = other DNA
atgattaacaatgacaacgacagagttgtgttcttcgatatagacggtacactgctcgatacatcaaacttcgctgaaaccgctcgcaaagcagccattggcctcatggtcgataacggcttgccgctggataaggatgaagcatacggggtgttgaagactattatccgggagaagggctccaattacaacaaacatttcaacatactcacgcaggtggtcctcggccacgaggacccaatgctggtcgcgctgggaatggttacctaccacaacgtgaagatggcccttctacggccttttgccgagactatcgacaccctcatctatctgaagagccgcggataccgtctagctgtgattagcaacggcatcaccatcaagcagtgggaaaaactggtgaggcttaatgtctattcctttttcgatgcggtcatcacctcggaggaagtgggcaaagagaagcccgacaacttaatctatgacgttgcactgaggaagatgagaggaaatcccgagaaatctgtgatgataggtaataagcttaaagaggatgggctgggggccgtgaacgccgggatgagtgccattctggtaaatagcgatgtaacggaggaagaccgagaatttatcaagaagaataagctggacattaaaattatcgagaacatcggagacgtggacacaatcttgtga

SEQ ID NO: 9249 - DNA, 684 bp, synthetic construct
  source 1..684: mol_type = other DNA
ttggtcagcgagacaaaagagcaactggagctcgaagcagaaatcaaagagcaggcgcagatatttctcaaataccttaattcaactctgccagagagtatggaactagaatacgaggggttttacaggagaggatttttcgtatccaagaaacgatacgctgtgatcgaggatggggagatcatagccaaaggactggagttagtgagacgcgactgggcccccattgtcaagaagacccaagaggccgtgctgatggcgattctgaaggaaggcgatgccgacaaggcaatcaatgaagttaagaaggtgctgaagaatatcaagaagggcaacgtggataagaaggagatgatcattcacacacaaatcactaaaccacttgaccagtacaaacaggttggacctcacgtaatagctgcacgcaagattgaagagcatgggattaaagtctcccgtggcacgatcatccagtatataattgtgaagggcaaaggttctatcagccagcgggccgtgccgtacgagtactcggagggttatacctatgataaaaactattacatcaacaaccagctcatccccgctattgagaggatcatgtacagcttcggctataccaagcgggacttggaagacatggccaagggggaagtccagcagagtctggacgccttcttctga

SEQ ID NO: 9250 - DNA, 345 bp, synthetic construct
  source 1..345: mol_type = other DNA
atgaaaaaaaggctgattagcagctacgacgagatcaatgatatctttgtgggtaaggttgacggggagaacggcttctacgccgacttcgacatcagcgatgggatatttctaggcattaacaaggacaactgccccaattcgatctacgtgtccgatgcatctcgcgtactgaatgtctcaaagcagacgctggaaaattccgatgtgaaaatcacagtcagttgtgattccacctgtctctatttctcaatgttcattggaaacctccacatctgcagctaccggtgcaagaacatatttaagattccattcatcgactttgaaatggacagtaactattga

SEQ ID NO: 9251 - DNA, 276 bp, synthetic construct
  source 1..276: mol_type = other DNA
gtggacaatcctaagataaacgttaacagcgaagacgaaatcgtcattgtcgtgcccaaagacgtggacgaggacgagctggtgattgacctagacgaactgggaatcgacatcgagcagctcggggatgaggtgaacatagtaatccaggtggagggcgatgatgagctcgagagcgacttcatcaccgacgaggatttcatcctggagccaaatgaatggtacttcgatgatgatccctatggcattgtctactacgaatttccggaggaatga

SEQ ID NO: 9252 - DNA, 231 bp, synthetic construct
  source 1..231: mol_type = other DNA
atggacaaagagatcccctactatgtgcttgacgagaacggccagataggaagcatcaatgaaccgtacatcgatgacggcgatctgaaagagctgctcctgtccattttgggggacgacatcccacaggaagagatccaaaagattctggacgcaagcgccgacgaaaaactcaccgaggatgaatttgataagctagtcgatgagttcattctgaagaacaagaagtga

SEQ ID NO: 9253 - DNA, 375 bp, synthetic construct
  source 1..375: mol_type = other DNA
atggccatctctcagggaaagtcaacaaggagcccctccggtgcgcgcaatgttgctaaccggggcaaaagaaagagcgagcttggacgcgacccagccgagacaaggctggatgctaagagactacgcaaaattcggactcgtggcggaaacgaaaagctccgactggccactgggaatcgaatcaatgtgacggacgccgatgggaaaaccaaggtgctggacatcctcaacgtggtggagaacaccgcaaatcctaactacgtccggaggaacatcatcaccaagggcgcaattgtagagaccgcggaaggtaaggccaaagtcacaagtagaccgggccaggacggggtgataaacggcatattgatttga

SEQ ID NO: 9254 - DNA, 1380 bp, synthetic construct
  source 1..1380: mol_type = other DNA
atgaagctaaaaaagagcgattatattattatcatctccttcatcgcttcatttatcgctgcattcatcagcgcagcccctgccgtggcccttccccagctagccaacgaatttaatctgaacaatatcatgcagaactgggtggtgaacatctttctgttcactgttgctataactgccgtccctctgggcaagttcagcggcaaaaatggcatcaaaaaaaccttaaaccttggccttatcttgttccttattggcaccatcattactacattcgcaaatagttatatcactctcctgatttttagagcaattcaggccattgggaccgccatgatttacaacacccagacaagcatcgtggtcctggctgtcgaggaaaaaaacaggggaaaggcgctcggaataatcatatccggcgtttacatcggactggcgatcgcccccttcatcagtggcattctgacttacaatttcggttggcgaactattttttactttacaatccccttcacacttcttgcgctgttcttatccttgtacaaagtcaaggatgaatggaacatgtacgaagacgagagctatgacaagtttggaagcattctgtatatgattgggatcttcttctttatttatggatttaccatcttgaatcagaccaaaggggtgatcttcactgtgatcgggatagtgttactcatcggattcgctgtaatcgacctgaagatcaagaacccaatcttcgacctgaagctcttcaagaacaaacggttctcctcctcaaatatcgcctcactaataagttatattgccacctttgttgtgacatacatcctgaattaccacttccagtacatcctcagtctcaattcccaaacaaccggcattctgctggttgtgacgccggtgataatggctatcatatcgccatttagcggaaagttttcggataagatcgatagccagaaactggccgccattggcatgggctttgtaacgattgccgtgtttatcctcatcttcctggactattcaaccccactgtgggtgattattattgctatggcactccaagggttgggttacgggatcttctccagcccaaacaccaacatgataatgagtagcgtgccccaggaggagacaccgagcgcgagcgtctcgattacggtcatgcgcgtcatcgggcagacgatgtccctcgccatgttgaccataatcttttcagtgattatgggtaacgtccccatcatccctgagtacttcagtctgctgaccaagagctctcaaacagcatgcatcatatccaccctgctgtgtttcattgcagtgatagctagcctcgtaggcattggtgggaagaacgacttgacgaattga

SEQ ID NO: 9255 - DNA, 1023 bp, synthetic construct
  source 1..1023: mol_type = other DNA
atgtccgaggataagatctccatgaatcacggtgccggcggagaagtcatggctaatttaattgcgagcacaatcctggataacatcacgaaaaaaagcgtgaacggcgggattagtctggacgccctggatgacggcgcaagcatacctattggagaggactacgaactcgtgctgacaactgacggccacaccatcgacccactgttcttccccggcggagatattgggcggatctcagctgccggaacaatcaatgatgtgtccgtcatgggggctaggccgctggcgattagcaatgccataatcatgcaggagggctttccaatagaagacttggaccgcatcatcaaatccctcaacgaggcctgcgaggaggtggatgtggccgtgatcactggcgatacaaaggttatgccccaggacaagctcgagggcattgtcatggttaccaccgggctcggcatagccaaaaagggggaggttgtgcgggactcaacgctagaagtcggagacaagatcattgtcaccgggagtctgggcgaccatggaatgagtctaatgtcttttagagaaggtttcggctttgaaactgacttgaagagcgacgtggctccaatgtggaacatcattaagaaagctctggagatcggcggtgttacggccatgaaagatcccacccgcggaggcttcgccaatgccatcaacgagatggccagcaaatctggtgtaggggtggtgctcgagcaagaggcgattccaatcaaggaggaagttcacgccgtctcggaaatgctggggatcgatccgttcgaagtagcaaacgagggaaaggtggtcatgggcgtgaaggccgataaggcagaagcaatccttgaggctattaaaaacgaaaagtacggtgagaacgcagctataattggtgaggtagtggaaggagactatgtcgtagtgaacacccctatcgggggggagaggatacttgaggcacccatcgcggaccccgtgcctcgagtgtgttga

SEQ ID NO: 9256 - DNA, 396 bp, synthetic construct
  source 1..396: mol_type = other DNA
atggtaagtatctttagccgacggattatcgcctacttcgtggacttctttgtcgtgtcggcgttcatgtggattgtgagttacctcctgtcattagttatcggcaccaacaatccgatataccactatttcatctatctggtgcccattttgataatgatctactttgtgctatgcgaaaagatcgtcggggcttctgttggaaaaagcctgctgtacctgcaagtgagatcccagaacggcgcacatatctcctggtcccaggccattgtacgcaacctcacgaaaatttattggattccaataatctttgactggggtatcgggaaggtcctgaagaaggacaggctcttcaacagcatcacaaaaaccgtcgtgatcgatgagcttaattga

SEQ ID NO: 9257 - DNA, 450 bp, synthetic construct
  source 1..450: mol_type = other DNA
atgaacaaaaaatccatctcggtgatcttactcattattttttcaatcacaatcatattcacgactgcaaatatcctcattaacgacaacactccactagagaatcaggccggaaccctgaaaatcaacaataagaccatacactatgagaagtccgggaagtgtctggaggtcattgatggaaatacaatcaaagtctacggcatcgggaaggtgcagctcacccaagttggcagtccgagtagcgaagccaaggacttcgtggagaacaattgcctgggcaaaacggtatacctggatattgatgacaagaaagtggaagacgagtatggtcgggcgcttgctatcgtgtacaccgacaccgtggatgtcaacaaggagttgattaacaacaacctgagcgaaataagctacttcacacccagcgaatttaagaagggggacatctga

SEQ ID NO: 9258 - DNA, 687 bp, synthetic construct
  source 1..687: mol_type = other DNA
atggagcagaagaacattacacagtactccatcaattatgaaacgaaacagcacccttcagtgaagggtctgcagatcattgagggcaagaacaatttccccattagttggttgaacaaacagggatactgtgaataccaactctatctggagcacgtgaaaaacataaagtccccaaccacacctgaaatgacccacggctccgagattcacaagcagctggaggacatcttcaagcaggaaagcgcccaagtcagctttgaagaggtgattgaaagcagcaagagtgaggcctcaatgagtcgcgagtgctttgtcatctctcccaaatacgggatcaggggccatatcgatgaaatctggatgaaaccagaggagatcgtaataatcgacgataaacctggaaggacaccgtacaagagcacgatgaatcaggtgcgggcatattgcctggcctttaaagacatgtcgggcgatgatagaaagatcaaaggagcgcttcgggaaagaggtactgagaacctcttctggatcgaacccttcaccgaggacgttgagaaggagattaagttcaccattgaccgcatacatgggctatttaacgggagcaagccattcatgcccactaaaaatccgaagaagtgtcactcctgccgattcaagcacgactgcgagcatgctcaatga

SEQ ID NO: 9259 - DNA, 861 bp, synthetic construct
  source 1..861: mol_type = other DNA
atgcactatattaattccaagaccatactgtcacccaaaaacggcatgaacctatatcgcggttgtacgcacgggtgcatctactgcgattccagaagtgacatatacaatatgaatcatcggtttgaggacgtggaagtcaagaagaatgcgctggtgttactgaaaaatgagcttcttaagcgtccgcagagcatgattggaacgggcgccatgaccgatccatatatcccactggaaaagcacctcgagtatctcagaaagagcctgaatctcatctatcggtacggctttggattcacctgcatcactaaatccgacctgatcctccgggatctggatttgctcaagaaaatcaacgagaaaacaaaggtggtggtgcagatgactctgaccacctctgacgatgacctctgccgcatcctggagcctcatgtatgcaatacaacaaggagggtagaagttctgaagatacttcagaagcacggtattccgacagtggtgtggttaactccaatcttgccttacatcaacgataacattgagaacatcgagtccatcctaaactactgtattgacgcaggcgttaaaggagtcatctgtttcgaaatggggatgaccctccgagagggggacagggagtactactataagaaattggatgagtatttccccggcctgaaagataaatacattgaagaatttgggaacagttactcaatccctagccccaacaataagcagctgatgagcatattcaacgagaagaccgacaagcacgacattctgaacaaacccgacgaagtctttgactacattagctacttcccccagaagtcggtccaatctcgcctgatctga

SEQ ID NO: 9260 - DNA, 1284 bp, synthetic construct
  source 1..1284: mol_type = other DNA
atgaatttcaacgaactcaacatctctgataatattaagaacggactaaaaggaatgggctttacaaaagccacccccatccaggagcagtcaattcctgtcactctgaagggcaaagatgtcatggggcaggcacaaacaggttccggtaaaaccgttgcattcgcaattcccattatcgagaagatcttcatcgacgacaaatccccgcaagctatcgtactctgtccaacccgggagctctgcatgcaggtcgcagatgaaatctcgaaggtcgcaagtaacattaagaaactgaagattctgagcgtatacggtggccagccaattggccgccagacacgggtcctcaaaaagggggtccatatcgtggtcggaacacctgggcgagtgatcgatcacatcaataggggcaatcttgatctgaacggcatcgagagcgtggtgctcgacgaggctgatgagatgctgaatatggggtttcgggatgacatggagtttatattaaagaacaccccaaaaacccggcaaacactgctgttcagcgccacaatgcccgacgagattaagaagatagcccgcaagtaccaacgcaatcccaaattcatcaaggtgaaggctaacaagaagaactccccaaaaataacgcagtatagctttaaatgcaatgcgaaatataagttcgatgacatgaccaggctgctggacgtattcgacgtggaactcgctcttatattctgcaacactaaaaagggcgttaattacgtggctaagcacttaaagaaacggggatactctgtggacgggcttcatggggacatgactcagaaaatgagagataaagtgatgaacaagtttcgcaatgataacatcgacatcttggtggccaccgacgtggccgcccgaggcctggatgttgacaacttggacgttatcatcaactacgatgtgccgcagaaccccgaaaactatatccacagaattggaagaaccgccagagcaggcaaactggggtacgcgttcacgctagtctgcagggacgaaactaggaggtttgccgccatcaaaaaggccaataacactaaaattaccgagaagcagattccttcctataaggaggtggagacgatcaagaataagctgattctggacaaggtgatcaactgtatagagcgtggagaactggaagacagctacattaactcaatcaaggacagtatgaataagaagataaacgctcagcagttggccgcgggtctcttgaagatggtgcgagaaaattga

SEQ ID NO: 9261 - DNA, 807 bp, synthetic construct
  source 1..807: mol_type = other DNA
atgatgaaagcattcaagaagagaggggcccttacccacttccagatcctcagcgaaatctccaaacaggaccctcacctcaagcaaaaggatttggcgaacaagctgggcatcacaatccaggctgtgtccgagaacataaaaacactgattgaacaaggatacatcagctcgaaggacggccgatcaccctataagataacccagaaggggattgaaaaggttaaaaaagatgccatcagtctgcggaagtacagcgacgctgtgctggagacgatgaaccattacaagacgatttggccagcgattgcaagggaggacctccagaaggacgatatagtggggctgtttatggacgacggagtcctgtatgcccacaagaaagaagagaacgctaccggcattgtgatggataacactaaggagggcatggatgtggcactgtccaacctgacaggaactattgatgtatccaatggtgaggtcacgatcattaacgtcccaaccataaaggacggcggaagcaaggccagcgacctagaactgatcaagaaggtatatgagaacggcacaaacagcggcgagccgatcgataaaatcgcttgtgcagggaccgtctcacgcgccattatcaataaattagagcttcccctagacattgaatacgccgcccccaatgcaactgccaatgcggcccgcaaaggtttgaatgttctcgctatctgcgtgggagatatgagtaaagccttcacccgggagctcgagtctgaaaaaatcaagtacaatgtgatcgacgggaagaaatga

SEQ ID NO: 9262 - DNA, 1407 bp, synthetic construct
  source 1..1407: mol_type = other DNA
atgcagatcccccaactaatgcacgagcagtacaggcaagctaaggagctcatcgagaacgcggaagacattaaggtgtactcccatatcgattgcgacgggatctgtagcggtgctatcctcagcaccatcctagacaggcagaataaggaatacgaaatcgaatttgtgaacctggacgtgttggacgacattgagcttacccatgagcttacaatattcagtgatttgggctccgggcagaagatcgacgcgaaagcccagaagaaccagaagatactcattctggaccaccaccctccccttcgggacttggactacaagaacaacaaggattatacttatctggagattaatcccaaccatcacgggatcgatggttcatactacgtctgcgggggaggcctgtgttactttctcgccaaacggttcggctacgatgatttaagctggattggggtcctgtcggccatcggtgacatgcaaaatactaagacagggcatttcgagggcttgaataaaatcatacagcaggacgcaattgatggcggatacctggaaatcatcaagagcgacatcaacatttacggcaggaacacccgccccttattcgtggcactgagctatttcagcgatgtgaaactgccaatcaccaacaataccaatgaaaccatggctattttagaggagttgggtattgacgaaaagcacaacagaaaaactcttaacgagctgacaatggaggagaagggcaagcttttccagcgtctcatgtccatgctgacacaggccgtgccaccgaaatatatccagtatctgcctcagctgatcctgggggactcctatactttcctgaaggaggacgagcacagcttcctccgggacggttcggagttttcaacggcaatgaacgcgtgcggccgaaaccacgaggagcagatcgccatggaagtgttgaaaggggaccgctttgtggcactggatgaacttgaagtcgtaagcaaaatccatcgcacgaacctggccaaagggattagtagtgttgccgaaaatgatgaaaccaatatcatagaactcgagaatctgcaatacttcgatggaaccggcattgctcctgaaattgttggaactataacgggcatgattctgggatactgcaattggaagaaaccgattatcggctttacccagacagatagcgacggcctgaaggtatccctaagatgttccagactgctgtcatatgatggcatccacttcggaaatatcatacgagaggtcgccagtgacgtgggaggatctgggggcggtcacgccatggcctgcggagcttacatcccaatagataagaagtatgagtttctcgaggagtttaacaaccggctcgacggaaaactcacaaaatga

SEQ ID NO: 9263 - DNA, 270 bp, synthetic construct
  source 1..270: mol_type = other DNA
atgatcacagtgtggccacagtatcttaacaagaagctatctctcaatgagggccggaagatcagtaaggaggattgcgtcaaagaccccaccataaatgacatagagagggcattgaagagactggggctgaactacgaactggagaaagacaaatcatacccgggaaagtggtacgaaaaatccggccgagccctcgtggagtgggataaaagcaaactcgaactgatcaaggaaattagcctgaagattaaggagatccgcaactga

SEQ ID NO: 9264 - DNA, 1095 bp, synthetic construct
  source 1..1095: mol_type = other DNA
atggccgactacaagtatgtgatcgtcggtgcgggccttagcggcctgacaattgcggagcgcatcgccaatgagctgaacgaaaaggtcttgataattgagaagcgggaccacatcggcggtaacgtgtacgatttctacaaagacggcatactaattcagaagtatggacctcacatctatcatactaactacaaaaaagtgcacgattacctgtctaagtttaccgaatggaccgattatgtgcacaaggttctcagttatgtggatgacaagctcgtaccaatgcccatttgtatagacacactgaataagctgtacgatctggacctcgacgagaacagcatgaaagaatggatcgaggagcacaaagaggacattgacgagataaagtcctccgaggatgtggtgctgaagaacgctggccgggacatttacaataagctgttcaagaactataccgagaaacaatgggggacatcggctgccaatttgagccccgctgtcatctcaagaatcccgttcaggtttaatcatgatgaccgctacttcagtgacacttaccagggaatgcctaaggaaggcttcaccaaaatgtgcgagaacatggccaagagcgacaatattcatattggccttaattccgactataaggattatatcgggaagatcaattacgagaagctggtctacactggtccaatcgactacttttacgactacaagtatggggaattgctctaccgatgcctaaactttgtgtacgaggtgctcgatgaggactcatatcaggaagccggagtggtcaactatccaaacgacccgtactttacaaggatcaccgaatttaaaaaactgacgcagcaaaaagttgggggaaagacggccattatgcgtgaatatcccggcttcaacggagaaaaatgctacccctaccctacccaggagtatctggataagttcaagctgtacgagagcgaaatggagaaagaagagaacgtaatcttcgcagggagacttgcaaaatacaagtattacaacatggatttagttgtgaaagatgcactcgaaatcttcgagaatgagatcaagtga

SEQ ID NO: 9265 - DNA, 1104 bp, synthetic construct
  source 1..1104: mol_type = other DNA
atgaacgataaaatcagcattatccttcccatcttcaacgtgggggaccacctccgcggaggcattgactcactgattaatcagacaataggcaacgagaacctcgagataataatggtcaacgactgttccaccgacggatcggataagatcatcgatgagtatgcggagaaatacgactgctgcattgccatccaccacgaaaagaacagtggtgcggcctacacaccacggaacaccggcattgacgcttgcaccggggattatataatgttcctcgacccggatgaccgctacacaccggatgcttgtgagacactgtaccatgccgccaaaaagaacaacgcagatgtggccttcggacgttttagaagaatctttgaatatggcgggaaagttcagaaaagcttctcgccctacatcgacaccctcgaaaatagctatccaaatgaaactttcgacacggccaactttctggatgttcccgatttcatctgggacaattttgtggaaaggttcctctacggcaaaaccctggaagtaacttacccaagggacgtgccaattgacacaatccacgtggagaatatcgagcaggaacctgacttgctgaagatggctcctgctgtctggagtaagatctataaacgcgagctaattacggataataaccttcgattccagcccttcgtatccggtgacgatatggcatttagcctcgaagccctactgaaagcaaaggggatcgtgtttctgaacaatttcatgtgctataactactacatcagggacctgcctaacgataagtccattaccaacactgtgaacgtgcggctgctctatgagctgatggaatcatacatttactgccggcaatgtacggagggatttagtaaggaggtgcaaaccgtctccataaatcctcatctgctgcattggactaattcctggaagagctctcccttcaccaaggaagagaataagttgttactgagtgaggtcaataagcttaagagcatccacaacacagacttgaagactaaaatcttactgagctccatttcaaccgcaatcgagtctaaaattcagatccagaaggagtga

SEQ ID NO: 9266 - DNA, 771 bp, synthetic construct
  source 1..771: mol_type = other DNA
atgagcaaacccgtggttgcgataacccgacccgaggacagggccaaaaaggcctgtgacatcgtcgaaaaactgggtggcgaaccttttctggcaccaacactggatttggaaccggtaaacagcaagtctttaaaggatctgattaaacggaaggacgaactcgactggatcattttcacctcccccaccaccatcgtgtcactgaataaattctacccggacttcctggggagtcttaattgcaaacttgctgtgatcgggaataaaactggcaaactcgctgaggagaacggcctcaaggtggacctcatccctgaggatttcaccgccgaggggttgattgaggagttcaaggaaaggaagataaccaaccagatcattggaatccccagaacgctgtcggcccggccagtccttccagaagagctggaaaaaatgggcaatacggtgatcctagccgaagcctataagtccctgtttccaatggacaagaaggcggtcaaggagttaatcagcaagatcgaaaacaaagagattgatgcaatcacattcacaagtcccctgactgtggagaacttctttaagataatcgagaataaggagaagattgctaagctgctctccgacaacatactaaccgtctgcattggacctatcacggcaaaggtgctcaagaaatataacattacatacatccaccctgatacttacacagttcccgatatgatggaattgctgtttaagaaatggcgcgagcagaacgagtga

SEQ ID NO: 9267 - DNA, 306 bp, synthetic construct
  source 1..306: mol_type = other DNA
atgcatgaccggatagagatcgctagggagttcgcaaacgccatcaagtcagacaaaatcatcaagattatcctttttggcagcgtggcccgcgaggacgatattgaagactctgatattgacatcctgattataagtaatgaatgggagcagatcgattccctcatcaccgacgaggtattcaaggtcgtcctagacacacaagaactgatctccccccacatattgagcgaaaaacagtttgaggaaaccaaaaatttcaacttcctgacgaacgtgctcaaggatggggtggagattggatga

SEQ ID NO: 9268 - DNA, 363 bp, synthetic construct
  source 1..363: mol_type = other DNA
atggtgctcaagctggacgagtgcgaagcattcatcaaaaaagccaaaagtaagttgacctccagccgagccctgtacgagatagggcagtatggggactctgtaggacgcagctactacgcgatgtttctaagcgcaaaggcactgcttgtgcgggacgggtacgatgtcagtagccataagtccctgattggcatctttggccgggactatgtgaaaaagggagacttcgactcgaatattgccaagtatctctcaggcacacaatccctgagggataacgcggattacgacgctatagatgccatctcaaaggagattgcccacggtaggatcaaacaggctgaaagattcatcgcctga

SEQ ID NO: 9269 - DNA, 468 bp, synthetic construct
  source 1..468: mol_type = other DNA
atgacgaacgtgctgattgcgtacttcagcgccagtggggtgaccaaaaatctggctgagaagattgccaatgataatgattatgacatctttgaaatcgttccagaggagatctacactcccgaggacctggactggaccaacaagcagagccgctccacaattgaaatgaacgacaagtcgttcaggcccccaatttccgagagctgtgacgtcggcgaatacgagaccgtcgtgatcgggtttccggtatggtggtatacggcacccacaataatcaacacattcatcgaaagtgtggacctaactggtaagaaaatcaaaatattttgcacttccggcggaagcggggtggacaagtgcgtcaacgatctcaaagccacctaccctgagcttaacttcacaaagggcattcggttcaccggaaatgtgtcaaacgcaaaggagtggatcgaacaggatctctga

SEQ ID NO: 9270 - DNA, 969 bp, synthetic construct
  source 1..969: mol_type = other DNA
atgtttagcaacataggcgtggtgggcgccggcgcgatggggactgcaatctctcagaccatctgcgacaatacccaaaaggtgtcactgtacgcgagaagggaagaactggtggactcaataaacacaactcgctttaacaaggattatttcccaaacattagactcaaggacaacataatcgctaccaacgatctgaatgacctcaaggacgccgagatcatcttccttacattgccttccagcacaatacgggaggtctgcagccagctgaagtatatcatttctcaagactgcgttctggtaaacacggctaaaggcctggagaagggatctcagaagcggatgagtgaagttatcatggaggagacagggaggcccgcctgtgtcctgtccggacccaacattgctgttgaaatggtggagcgcacattctcctccgccagcattgcgtgcgagaataaacagtaccttgagaaagtggagaaggccctatcaacgttccgattcaaagtgtcggccagttgtgacgtgattggggttgaatactgcggtgtaatcaagaatattatcgcaatatcccagggaatctgtgaggggatgaagatcaatgacaatgcccgatttagcgtcttcaccaagacctataacgagacgaaagatatgatcgaaaagtttggaggtaaccggaacaccgtggatgattactgcggcttcggggatattattactgcttcgaccctgaacgtcagtcgcaaccatacattgggtgtgttatacggccagagaatcgtcattgacgagaaggcaagcggcgtgctctttgaaggaaaaaacaccattgtaatcatgaaaaagctctgtaaaaaacacaatatcgactgcgcaaccgtggacttcacttacgatgtcattatcaataggatcaatccgaagaaagccttcgaaatcttttgggataagctgtga

SEQ ID NO: 9271 - DNA, 696 bp, synthetic construct
  source 1..696: mol_type = other DNA
atgatctgcgcggcaatccttgcgggaggcatagggagtagactgaaacagggaaagcctaagcagtttgttaacattaacaataagccaatcttggtccacagcgtggaaatattcctttccgtggatgagctagataaaattatcgtctcctctccaaaggagtgtgttgataagaccaacgacctcatggacgaatatttcccgaaaaacgacaagataattgtgatcgagggcggagaaactcggaatggcaccatcctgaactcgatccagtatatgaaagggcagaactgcgagaaagatagcattctggtaacccacgacgcatcacgcatcttcgtgagcaaaaagctgattaaggacagtatcaagtacgcaattgaagtgggtgccgcttccgctgccatccccgccacagacgtgattttcgagacagagatcgatgggaagctgacgggtgtccccttgcgaaagtacctctgccacgcccaaaccccacagagctttaacattgataaatttctggatatttacgaggacctgtcagaagaggaaatcagcaaactcgacgaggctatggtgctgttccatctgaggaacgccgacgtcaagttattccccggcgaccaaaataattttaagataactcggccttttgacatcaaactcgccgagtctatcttcaagaattga

SEQ ID NO: 9272 - DNA, 1068 bp, synthetic construct
  source 1..1068: mol_type = other DNA
atggacaacttcaagtgcggaagtatggactttaagatcagcgtgattgcccccgtttacaatgcggtggactccctggaaatagcaataaactctatcatcaatcagacaatcggtttcaagaatatcgagttgattctcgttgacgataaaagcaatgacggaagtcaggacattatcaaaaaatacgctgataaatacgaaaatgtgattggcatatttctaaaggaaaattcaggcctccccggcaaaccaaggagcctgggaatcaagtacgcctccgcaccttacctcatgtttctggatgccgacgacgagtatctgcctaacgctttcgagctgctgtataacaccatagtgaacgagaaatctgattttgtcatggggtcgcacttctggaatatgaatggggagcgaatgaagattaacatcctgcatgattgtaacgacaaatcagacgtcatcaatattaacccattcttaaatcaacgcaactttattctgcttagttacaaccacgtggccccctggggtaagatctttaacaaggagctgatactcaaaaataacattagctttccagaggacacactggccgaagatacctatttctacttcaagactctaatcaactcaaagaaagtgacccttctgcctaacgatagcctgtacatgtacaacgtatttgaaaataaggattccgtcatccacacgcacaacctcagcaaattcaactatttcctcaaagggttcgcgaacgtgatggagctgatcaaggacatccccttttccaaagagcggattctaatctccaatatgggcagtttgcttctcatcttctcgaatttgtctatgaaggagaagaaagaggccgtcccgaaaatctattacttcgaaaagagcttagacgaagaagtggtacttaagagaaaggaactcatactgcttaataagttgattctgaagaagcatttctatctcgcaattattatctccgatatctactctatcctgtataacaacgagaaaattaagaacctgtaccggaagtggggccacaaggagtga

SEQ ID NO: 9273 - DNA, 999 bp, synthetic construct
  source 1..999: mol_type = other DNA
atgaaaaccaagaaagagcggatattctattacgacttcctgagggcatttgccattatcgccgtgattatctgccatgtggactatttctttggccccctcacctccacaacccaaatcatcgtgcagatgacgttccacgatattggccggattggggtgccaatctttctgatgatcagcggagcccttctcctgaatcgcgagtatcctgatctcagccagttcctgaagaagagatttgtgaggatcatttacccgtttatcttctggatcatacttatcctggcccagatatactactatgggggcaatcccacgtatctctggaaagtcttcatcggtgaaccctcaattacttggtacttctgggttctgatcggaatttatctgttcctaccgatcctcaactcatttgtcaaagaatatggtgagaaggggctgaaatactttttagctatatggttcagcatcataattttgcagacattcaatgtgtacccattgtggactaaccttgatctgagctactttgccggatatgtgggctacccagttctcggctactacctggaaaacaaggagttcaagctaaacaacgagaaaatttgcattctcggggtaatcactcttctgatttcattgagttgttttgtgtacctgaattacatcaatagtaccgctatccattcgatttaccagaatatccccattgtcttcatgggactcgggctgttcatctctattaagtatgcagacaagctgaacaaatttaaagcgattaaggacaacttcatcggcaagagcatcatctctttaagtatatgctcctatggcatgtacttctcgcacgtcatcgtgaccaagtttctgtcctactacaacccccactccaacctcatgtttccactgatgttcataatgataatcttcctatcttggttgatgccttacatcctgagcaagattccttatgtacgaacattttccggaatctga

SEQ ID NO: 9274 - DNA, 1083 bp, synthetic construct
  source 1..1083: mol_type = other DNA
atgaacttgaccgagctgtactacaagctccctaaaaaaatccgctactccgagcgattcatcctgttttgcatcaagctggccaaacccttccacaagaaaaagacacatgagaaggagatcaactacacactgaattatcttttcaagtccagcgatgtgaagattgagggtactctcaggaacattcaactgctgtatgcagaactcctgaggttcattgataacatctgcaaaaagtacaatctggactattgtctggcttatggaactctgttgggagccattcggcatgatggcttcattccatgggatgatgactgcgatatcatcatgatcagaaatgactacaacaaactaatcgaggtgctgccttccgagatcaacaagcacaagttcctgaaggagaacattgggctgaccaaactggtcggtttccgcgaaaactacttcaataacgttaagaccctctacgacgaagaattggggcacgacgtgtatttccacgactacaataaggcacctaaacagttcgacagtaagtataacgaaaagttacccaacttatgtaaatcactctttctgcagatagggtggctaaaaccgatggtcaggcttgacatatttccctacgactacatcgaggagaaatccctaaatcactacgacaagcattatcggcccgctaaggtgagctttagaaatttctttgccgatgacgactttagctatgagaaggaatttaataagcacttcgataaactgggcctgacgcttgagaagaccaagtatgtgggcgaagggatagatggatctgacgagtacgtgggcagctacgactccagcatgtttttcccagtaaaaacacataaattcgaaggctacgatctcaagtgcccgaacaagtctgaagagttgctcaaacgttggtatggcgagagttacatgagtatcccacaggccattgtcatgcacggatactcagagtataattcgcggttctttgattcaatagaagacatgaacgaaagctttaaactcgcgatcaacgagcttaagaagattaatgacgaatttgagtga

SEQ ID NO: 9275 - DNA, 834 bp, synthetic construct
  source 1..834: mol_type = other DNA
atgttcaggaccaagcgatacgatgacgagactctcaaacatctccagaaggtccaaatgtgcattctcaagtacttcattaagctctgcgaggagaacgacctgacgtacttcatctacggcggtagcctacttggaaccataagacataaagggttcatcccatgggatgatgatattgacgtgatcatgtttcgggaagaatttgagaaattgaacaagattatagagaaggacatcgacgataagtaccgcttcatcaacgtcttgaatgaggagacataccactacacatggggcaggcttatgctcaagaacactgtcataaatgaatggtgggccgatcaggtggattacacgcagaatatctttattgatgtgttcattctggacaatattccaaacaatagcttcaaacgttttattcacaaatgggtgtccttttcactgaaccagctgaccatgtatgcattcatcaagtatgacaatcagtcgaagctgaaaaagatactgcagcaaacaatccactacctgatcaagatcatccctatcagcgcctatggcattaaaaaacggtgtgtgaacagctatcgcaagtaccaaaacgacgactgcgatgacatatgtgatttcccggcaatttgccagatgcccatctatcacaaaaccgactggttacctcccaaaaaggctcagttcgaagacatcgaggtaaacatccccaacaattatgacaaggttctgaccagaacttacggaaactatatggcgctgcccccagaagaatccaagtggagtccggcccctgacgagatcgactttggggagtactga

SEQ ID NO: 9276 - DNA, 1308 bp, synthetic construct
  source 1..1308: mol_type = other DNA
atgaaatcggataacccaattgtctacacttgtttctgcaccgatatcatccatgacgggcacctaaatctgatcaacgaggccaagaaatatggagatgttgttgtcggagtgctgtgcgactctgagatggtcaaatataaccgcttccccctcaaaaccacggaggagcgtatcgagctggtgaaggagatcccggatataaaggatgtaattgtgcagaacaaaattatgtacgacgatgtggtgagcgagctcaaacccgattacattatccatggcgataactggagcgaggagtctatgaaggttataaggagaaatattattagcgtgctggacaagtacggggggaagttaatcgaggtgccctatacgttcaatgagaaaatacagaaagtggacaggcagatgcgagaaaagctagccatgcctgagctcagacgcgccagactgcgcaaactgctgaacatgatccctgtggtcaagacaatcgaggtgcacagtggcctgaccggcctgatcgctgaaaagactgtcgttgctgacgacgagcacatcgaccagttcgatgccatgtggatctcaagcctgtgtgacagtaccgaaaagggcaaacccgacatcgagcttgtggacatgaccagccggttccgaacaatcaacgacatcatggaagtcactacaaagcccatcatatttgatggggacacagggggcatagcagaacattttgtttacaccgtccgatccctcgaacggatgggcgtgtcagcagtgattattgaggataagatcggactcaagaaaaattcgttgtttggaaatgaggtcaagcagacccaagacgaaattgaccacttctgcgaaaagatctccgcaggtaaaaatgctcagttgtccgaggatttcatgattatagcccgcatcgagtccctgatccttgaacagggtatggatgacgccctcaagagggcattcgcctttcgggatgctggtgccgacggcatcatgatccacagccggcggaaagagccggacgagatcctggagttctgcgacaagtttagggccgaggacaaggaaacccctattgtagtggtgccatcctcatataacacaattacggaagatgaacttaaagcgcacggagtgaatattgtaatctacgcgaaccagttactcagagcagcgtttccaagcatgcaaaacgctgccaagagtattcttaagcaccacagggctcatgaaatcgacgaaaagctgttgtctattaagaagattatcactctgatagacgaattgtga

SEQ ID NO: 9277 - DNA, 732 bp, synthetic construct
  source 1..732: mol_type = other DNA
atgagcagatatgcaattctttcggatatccacggcaacctcttcgctctaaaggaggttttcaaggatctgagtacacagaaaaccgactacataattcttttgggggacctgatcgactacgggatgcagtccaatgaagtggtggagttcatccgggataacctgtctagtaagataatctgcaacatctggggaaaccatgagatggccatcctgacaaaggactttaagcacttcagcagctcaaggggtgttgaaagtgccaagttcaccgactccattctgaccaacgactctaggagctacctgaacaacgaactcgtgaaggaggggaaacttgattttgagatatgtgagaagcaggtcttggcagtgcacggcagcctgacggattattactggaaagctatcttcccagacaatctaaacggcaattatatcgactacgacatcgtcctctcaggccactcccactacccccatgtgtttcaaaagttttatgaggtggatgatccggacatgcgaaataagaagtccgtactctttattaatcccggatctgtgggccagcctcggaatcataacccaaacgcccagtatgccattttagacactgacctgatgaatatcgaactgaagagcgtcaaataccccaaatacgatgcgatggatctctacgacggtaatattgatgacttctatcgcaaacgcctgaaaaacggaatctga

SEQ ID NO: 9278 - DNA, 1005 bp, synthetic construct
  source 1..1005: mol_type = other DNA
atgaacatactgtatatcattagtggcgtgacaggaatgacgggtaacgagctggtgcgccagttgctcaaccagaatgaggatgaggtgaagatcatcggcttcgacaacttttacgcatcgtcaattgatacggtcagcgattgtattaacgacgggcgtttcgacttttacgagtatgacctcaacagtaatgacgatatggataaaatcgaagccctggtgctctccattaaggacgatttcgatgaattagtatatattaactgcgccgcggtcgtgcacaccgagcacttctataaagtttacgagacctatcagactaatgtggcttccatgaacgacttcctgcaacaggctatccgggtgggtgccgaaaagtacatcaattgttccacatcagaagtctactccatgaatagctggaatgaagaggggggggtgaaggagagcgacttcatcaccatggccgacgcagaacacagtcagaggaccagttacgcaactggcaagttgctcacagagtttttcatgaaggacagcgtcgataacggcaaaatcaagggatgtagcatccgctttgccaatgtgtactccaaggacgagaagtacccaaagcatatcataccccatattatcgacagctttaagaacaagggcgaagttgtgctgcttgaaaattcgaagaagaactgcaggaccttcctgaataactatgacagctgcagcgccgtaatcgaactggctaaaacggatagcgcacttgatgggacaatctataatgtcgctacagacgaagagatttcaattatcgacctggccatactgatagcgaaaaaaatgggaattgataaacctgttattaaatttgagggctacagagagtctgaccccgagcggagactactatccaccgaaaagatcataacccgaactaactggaaaccgatcattgacctcgataagggactggacgagtgcatcgagaactacactaaaaactga

SEQ ID NO: 9279 - DNA, 771 bp, synthetic construct
  source 1..771: mol_type = other DNA
ttgaagatctccattattactgtggccggggtctccagcaggttcaacaaggacattagcgaggaggaaaagatgcttaagtgcatatactacgaagaaaatcccaaggacacccttatctataagatgattaacaagctcagttattgcgacaaaatcgtggtggttggaggatacaaatactctgacttaaccgaatatgtcaataaagagatccctatagagctgcaggagaaaatcatgctcgttgaaaacgaccggtacgccgatctaagctcaggctacagtctatacctgggcatcaaagaatccctgaacaacttcgacggtattgaggagcttctctttgtagagggggatctggacatcgatagcgagagcctgacaaaggtcatcgattcggacaaaaatgtgctgacattcaacagagaaccaattttctcaaacaagtctgtggtcctgtatcagaatgagaacgacgaataccactacctgttcaacagtaatcatggcatgctgatcctcaacgaaccgtttaaagcaatcttcaatagcggtcaaacttggaagtttcgcgacattgagttgctgaagatagcgaacgattatttctacgagaattgcatagatgataccaacctcggcattatccagaaatactttgactccgtggagaataaggataccatcgagattatcggattggagcactgggtgaactgtaatacgcgagctgactatcagtatatcaaggaatactgggggaaatga

SEQ ID NO: 9280 - DNA, 1182 bp, synthetic construct
  source 1..1182: mol_type = other DNA
atgaaaaatctggatgaaaggctgaagatcgtcgaaaagcacgtgaaagacgacgagattacaataatgataattggcctgggtagtgttggaacatacttgctggacttcctagtaagcaaaaacgatgcggcgataaagctcgtagtggtgggcagaaatcaggaaaagatgcagtctgatgttaacatcgtccgggtggccgggctgattcgggaagtgaacaaatcgcagattgtcgtggaagcaggcgtggacctcaacgatattgactcaattcagaaagccatcagtaagcataaccctgatttcatcgtgaatagcagcagagcttatcccgggctaaagtacggctccatatcttggtccaacgtccgagcctacgggatctggactcccttgtcaatcaagttcacgaaaaatatcatggaagcatgcgagaacgttgacactgatgcagtggtcattaacacgtcatacagcgacgcagtgattccatggcttaagagtgccgaaaaggcctaccctgacttcggctccggaaatttaaatcacctgatcccccgcatgaagtttgctgtcgccaacattctcggggtggacgacttctggaatgttgactttaactttgctgccgcccacttccacgatgtatgcattagcaaagagggccaaaccgaaggtgtggacttgcctctcaagatatactacaaaggcgatgagcaagacatcccgcatgatgaaatctataatgcttgtagcatcagcatgcccgtggatcagaagaggaatatgatgaacgcttctagtaactaccggatcatttccgcaataatcgatgcaatacgcaccggtgagaaccagaaaatcttttctccaggagcgttcgggcacattggaggatatcccgtcatcatcggatataaggagggcaagatttcggcttggatcgatgagtccgtctttacattcgacgagatggacaaggccaaccgtaaatcccttgctctggatggcgtggaggacatccttgacgccaccctgatctacaccgatgacctgatcaagaaagttgagaaggccttcggggaggacctgccgaagaaggtgaaatatgacgagattgagaagaccgccgagtttctcatcgagaagatcatcactccacagctgaataaatga

SEQ ID NO: 9281 - DNA, 1119 bp, synthetic construct
  source 1..1119: mol_type = other DNA
atgaaagtggaggattttgttgatgttttggactgtgagttttacacgggggttccggattcccagctcaaggccctctgtaactacctcataaatgagtatggcattgatgaaaagcatcacttgatcgcagctaacgaaggaaactgcaccgctctggccgcaggctaccatctggccaccggaaaggtgccagtcgtgtacatgcaaaactccggcgaaggcaatattatcaatcccgtggcatcacttctgaatgaccaggtctacgccatcccagcgatcttcgtcatcggatggagaggacagcctggcatccatgatgagccccagcacatttaccagggaaagattacttgcgacctgctggatttgatggatatcgagaactttacagtcagtcccgaaacctcggtggacgaactgaacgacgtaatgatcaaatttaacaatgtcctgaagtccggcaaaagtgtggccttcgtgatcctcaagaatgccctgacttatgacgggaaaactatctatgaaaacgacaatgagctcatacgcgaggagatcatagagcacattgtcaacgtctcggacagtgaccccatcgtaagcacaacgggtaaggcaagccgggagctattcgaaatcagggaaagcaagaaccaggcgcacaaacacgacttcctgaccgtggggagcatggggcacagctcctctattgccctcgggatcgcaataaacaagcccgataagcgcgtgtggtgtattgacggtgacggcgctctgttaatgcacatgggctcaatgccggtggtgggaaacgtgaatcctgacaatctaatccatattgtaataaacaatggtgctcacgaaaccgtgggtggaatgccaaccgccgcggccggcacggacctggttgctattgccaaagcttgcggctacagctatgccgtgagcgtggacaacattgatgatctcgacgaggagctgatcaaggtcaaaaatatggggaatctgtgcttcattgaggttttatcttccatcgggtcacgggcagatcttggccgacctaccacaacagccctggagaacaagaaaagcttcatgaacttccttaaccaatga

SEQ ID NO: 9282 - DNA, 843 bp, synthetic construct
  source 1..843: mol_type = other DNA
ttgaagtataacgaatatgacgacaagaccctgaagcatctgcagagcttggagcttatgattcttaaggacttcatcaagatttgtgaggagaacaacctgacatactacatgtatgccggttcccttctcggcaccatccgacataacgggtttataccctgggatgacgacctggacgtcatcatgtttcgggacgatttcgagaaattcaaaaaaatttttatctcatctcaaagtgataagtatgaactcctctccaacgagactgaaaaagattacttccacctgctgagcaagttaatgcttaaaaatactaaattcgaggaagactgggtgaaccaggtggattttcatatcggaatcaacatggatatctttgtcctagatgatctcgctaatggcaagttcaagaggaattaccagctcaagaaaagcttcctctataacaagctgctgatcatgagcaagatcaaactgaatgatttgccattctctacgaaggtaataacccacgcatgctaccacattctgaacctgttcggaattaagccatcaaaaatcaacaagcggtgcttaaatttcttgaataagtataagaatccggatgccgaatttgtctttgacatatccgccaacgcggacgaatacccccagatcttccgccgcgacgacttcaaatcgatcataaaagttaaatttgaggacattgaggtgaatgtgcctgtgaactacgatcacattctgaagagcctctatggggactacatgagtctgcctcccaaggaggacagatacaaccacatcacagagaccctggactttggcccatacgaactatga

SEQ ID NO: 9283 - DNA, 1488 bp, synthetic construct
  source 1..1488: mol_type = other DNA
atgagcgacaagaacgaatggggcagcaacatgtcattcatccttgccatgataggcagtgcggtgggactgggaaacatttggagatatccctacgtcctttattcgaacggcgggggggccttttacatcccatacatcgtagccattctcctgatgggaatccccttcctcatcttggagtacggggtgggctacaattataagtcgagctttgccaaagcaatccggaagatcaatgccaaatgggagtatctgggctggttcctaccagttgccgtgtttatgatcatgatctactactccgctatcctgggctgggatggaatctacatggtgctgagcttctttaagggttggggagcagatcctaacacctactttgctactacgctcttacaatctagcgattccatgaacggcttgttcaccttcattcccgttattgccatcgccatgttagccggctgggtcattatctggttcatttcacataaggacctcgagtctggtttaggtaaggtttccaaaatactcgtgcccctgctcttcctgatcatggtggttattgtcgtcttttcacttacactccctggcagcagcatcggactggctgagctattcaacccggactggagtctcctcacgcactttgagatatggatggctgcattcggacagatcgtcttctcactgagcttgggcatgtccatcgcctttacatacgcaagttatacaaaagacgggtccgacttaattaccaataccattagcatcgccctcgcaaattccatatttgagaattttgctgcactgggagtgttctcaattctaggctatatgtccctgcagtccggaactgccgtggcagacctcgtcactcagggtactgggctggtttttatagcctatccaactgtcttcaatgtgctcggggattgggcattggtacttggcccgctcttcttcctgacagtgtatctggccgggcttaccagtattctgtctaccattgagccactgagctttagtatccagaacaagttcgggctaacacggtccaggacaatgaccatactgtgcgtggtgggtgctgtggtatcgatgctttatgcgaccgcttacggcggaagcctgcttggctacgtggatacattcattaaccagatagctctgctgatcggggtggtcgcggaatgtattgtcttcgcctggatcttcgaagcggaaaagctgatcgacttcctgaatgcgcgcagtaagaccattaaactggggaaatggtggttggggatcgtgaaatacatattgcctatttttgtaaccgtgatttggatcggcggcatggttgacgtggtcaacaacggtaccatggaccaactgatctttaccatcattagcgccgctgtgctgctgatcgccactttgatcttcacggtgctgcctgccaagacgcccgaatgggataatgctgaggaccgagtctga

SEQ ID NO: 9284 - DNA, 369 bp, synthetic construct
  source 1..369: mol_type = other DNA
atgaaaaactatgtgattatcctgattggagtcattatcgccctggtgatcgtggggggcgccatcgcgtacactagtatgcacgacgacacgtccgataacaacaataccacgataaagtcttgcatcccgaatatcacaaacgcaaccaacgatgctcccaacgccacaggcgatgataagaataccacctcctccgaaccttacgtggtcagcgaggtcgtgaaatttaatgcacagcaaggcgagggatattaccgggaagtaacatatagtgacgggaacttccgccagtacgacgttgacactggtaagctaatagggagctcatacgactcggaccaggataagctcccaagcatggagtga

SEQ ID NO: 9285 - DNA, 285 bp, synthetic construct
  source 1..285: mol_type = other DNA
atgatttttagcgaactcctaaagcatttcaatatcaaagaggagttcccaccttacctgcttgaccagtcctttaatgaagtcttcctggacggagagttgttcaggattgacaaaaactacaagatcgtcgtaaagacccggcaggatgtggttcacaagatgttcataaagccggacgacatgtaccccgtgatcatcctgagcaagctgcccaacggcctcctgaacggcatgaaatttgggcacgccaaagatgatgtgatctatattaacaagctctga

SEQ ID NO: 9286 - DNA, 729 bp, synthetic construct
  source 1..729: mol_type = other DNA
atgaacaagaaggagctgatcaatagcgggaaggtcaagagcgtcttcaacacagataacgacgatgaggtgatcatcgagtttagggatgacatgaccgcgggggacggtgcccgaaaagaaataatggcaaacaagggcgcgtacaatgctgtgatatcttccaaaatcttccgggtactggaggagaacggggttgccactcaatttattgacctccctgaaccaaacgtcatggtagcaaagaagctggagatgattcctatcgaggttattgtgcgcaacatcgcaaccggcagtctggtgcggaaatatccaatcgaggacggcaccaaacttaatccccccatcgtgcagatggacttcaaagatgatgagtatcacgatcccatgctcaatgatagcatcatcaaagccctgggaatagccacacaggaggagatcgatattctgacggaaaaagccttgcgcatcaacgagattctcaccaaattcttcgccgattcaggcattatcttagtggactacaaggtcgaatttggtaaggataaagacggcaacattctgttgggggacgagatatccccagacggatgcaggctgtgggattcggaaacactagacatgcttgacaaggaactctttagaaagggaaaggacgacgaagtgatgactgcttacatggaagtgtacaatagaatcatgccggaggacgaaaaggtgatttga

SEQ ID NO: 9287 - DNA, 267 bp, synthetic construct
  source 1..267: mol_type = other DNA
atgttgtttgacattgaagtgaagatctccctcaaacgaggaatgctgaacccagaggcaaccacaattgagagaagcctcgatctgcttggctacaaagtcaagaatgtcaagacggatgagatcatcaagttccagatggagggggaggacagggaagtgatccgcagcaatgtgaccgacatgtgtgaacggctactgtgcaaccccgtaatacacgactataagattaacgttatcccgcagaacatggcctgcggcaaatga

SEQ ID NO: 9288 - DNA, 645 bp, synthetic construct
  source 1..645: mol_type = other DNA
atgaagatcggcgtaatacgcttcccaggcaccaattgtgaccgggatgtggcaaaggcctgcgagcttgccggtctggaaccggaatacgtgtggtggagtgaggagaagctgaccgacttcgatggtattgtgatccctggcggattttcgtatggggatttcctgagggccggcgccatggcctccatcactcccgtcatcgacggaataaaagaactggtcaaagaagagaagccagtgctgggaatttgcaatggggcgcagattcttggcgaaatcgggctcatccccggaattttcatcacaaacgagaaccctaagttcaattgtgagtggtccaaattaaaggttgctacgaaccgaactccattcaccaaggcatttaaaaaggaccaaatcattgacctcccgatcgctcatgcagagggcagattttacacaaaagatgtggatttgctcaaggaccaggaccagatcgtgttgcagtttgaggggaaaaaccctaacgggtctatcgaagccattaccagcgtctgcgatgaatcaggcctggtggttgcgatgatgccccaccccgagcgggcttgcgagagcatattcggcagcgacgacggtctaaacttctttaagggatttctgtga

SEQ ID NO: 9289 - DNA, 720 bp, synthetic construct
  source 1..720: mol_type = other DNA
atggtggtgtacctgattggggcgggacccggcgacgccgatttaataactctgaaggcggtcaaagccctgaacaaggcagacgtggtgctgtatgactacttggctaacgaagagatcctcgctcacgccccggagacgtcccagagaatttacgtgggtaagaaggccggcgagcattacaaaactcaggatgaaataaacgatctgatcataaagcaggctcggaacaacgaaaatgtcgtgaggcttaagggaggcgaccctttcgtcttcggccgaggaggcgaggaaatattggccctcatggagcacgatatcaaatttgaggttattcccggggtcacctcggctattggagcacccacctctctgggactgccagtgacgcataggggggtggcaacaagcctcacgatcgtcaccggccacgaagaccctacaaaacccgagagtcaagttcactgggactataccgccgacactctcatcattctgatggggattggcaacatccgcgagaacacagctgagatcatgaagtatcggtcagccgataccccagtgtgcgcaattgaaagcgggacactagccaatcagaatctcgtattcggtaccctgggcgacatctccaataagaaaatcaataccccagccatccttgtaatcggggacgttgtgagcatgtacaaggacatctataactaccagggtgattga

SEQ ID NO: 9290 - DNA, 1788 bp, synthetic construct
  source 1..1788: mol_type = other DNA
atgtgcggaatcgtggggtgcatcctgaagaatgatgacgatgtcgctccaatcctctttgattgtattagcaaactcgagtaccgaggctatgactccatagggttagccacgtacagtgaggacaagatccacatcaagaaggacaaagggaagatcaaggaggttgataacaagctgaacctcagcgacatgcctggaaactacgggatcgctcatgtgcgctgggccacacacggcgatccttccaaactcaattcacatccccacgtggacgaacggcgggatgtggctgtcgtccataatggcatcattgaaaattacctggaaattaaagaaaagctcataagtgagggtcacgtattcaagagcgacactgatactgaagtgatcccccacttaattgagaaattcacaaatgaaggtttcgacctggaacacgcagttaggaaaaccgttgacatcatacacgggacgtatgcaattgccgccataagcattaacgaacccgataaaatcgtcgcgacccgcaaggacagcccactgatcgtgggaatcgggggggagggatattacttggcatccgactctccagctatcctgaagtacgctcgcgacatcatataccctgagcagggggaaatagtcatccttgacaagaacggcgtcgtcgtgcatgacgagtttgataacccagtcagcaaggaaattgagacaattaactggacacccgagatggctgagaaggagggctataatcacttcatgatcaaggaaatcaacgagcaggcaactagcgtgagaaacaccctgactcagagggagcatattcaggaaattattgatgacattgatgagggcatccaacgaatatgctttgtcgcctgcggcacctcatatcatgcatcgctcactggaaagtacttaatagagagtctggccggcatcccaacagatgtgatcctggcttccgagttcaaatactccgccaacacactgaatgataaaaccttggtgatatttatctcacagtccggtgaaaccgccgacagccttaaggccctggacgtggcaaacgagacgagtaagaccctgggtattgtgaacgtagccggctctagcatcacaagaagggcggagtatgtcattcaaactcaggccggcccggaaattggagtggcagcgacaaaaacctacgtggcccagctcacgagcatttatctctttgctgccctgctggccaagaacaccgagctacttgaagagctggaaaaagtgcccgatttcatcgacgaggcgctcgaggacatcgactttatcaaagaaatcagcaagagatataattacgctcgtgacttcttctacttgggccggggttattcatatcccacggctcttgagggagccttgaagctgaaggagatcacctacatccacggcgaaggctacgctgcgggggagcttaagcatggtcctctggccttgatcgatgaaggcatccctgtggtggttattgcgccaccgggagattcgcaccgcaaaaccatgagtaacctcgaggaagttaaatcccggggagccaatgtactggccatcggaagcgccgacgacgatgccctaaagactaaagcagacgacattatcaccattaatccggaggtaaacgagataatcgcacccctggtgtatgttgtccctcttcagctgattgcctactacattacactggagaaggggcacgaccccgataaacccaagaacctagcaaaatgtgtgaccgtggagtga

SEQ ID NO: 9291 - DNA, 1896 bp, synthetic construct
  source 1..1896: mol_type = other DNA
atgtttaacaagaaaatcagtctaattctgctgacactggtgtttatgctttcaatttctgccgctgtggccaccgataccaattctaccgacgatgtaatctcgagtgacgaggaggctgaacctccctcggtggtctctcaggacataagcataaacgagggaaatgattcaaaccctcaggaaaattacactttgaagggcagcgatgtgagtatgtattacaactcgggaagcggctatgaggcctccctttctgacggaaatgactctgtggaaaatgcaacgattaacctgaacattaacggtgtagactataataaaagcaccgacgccagtggtaaggtgttcttgatcatcaacctgaaaccgggcgactatgtaatcacagcgagctacggcaacctcactacagagaataagattaacgtcttgccagtgataacgggaaatgacgtgagtaccacttacaagcattcagtgccatattccgctacatttttaaaaagtgacggtagcccactgtccaatacctatgtcaaatttaagctgaacggcaagacatattccaagaaaaccaactcgaagggaatagctaagctgtacgtcggctcaaagatcggaacgtacaatatctatgcaatgcaccctaatggatacagcatctccaataaaatcactgtgaagaactccatcatatctagcaacctgaaaaaacactacaggagcagtaagacttttaaggccaccttctacggtaaaaatgggaagcttctcaccggtaagaccattaagttctacacgaaaggaagctacttctacaaaaaaaccaattccaaaggtgtggcttacattaaagtaatcagtaagcccggaacctacaagattactagcattaacaccaacaccggcgagaagaaatccaacaccatcacggtgctgtccacactggaagcgaagagcatgacagttttcaccggcaccacttcaaagtttaaagtgaaactctacaaaggggaaaacatcgctaagaacacgaagatgaccgtttatgtggacggagttaaaaagcgcgtgacaacaaactcaaatggggttgccaccgtgaagttcaaactggataaggggatttataacatcaagtcggtcgatccctttacaggctatgttttaaacaagaaggtgactgtgaagctggcgtccatcagtgccattaacgtcaatgcaattgaaggcaaggaagggctcttccccgccaagctactgcagcaaaacgggaaggtcgcaagtggtacttacatggagatgacgatcgatggcgtcaaacacaaggtcaaaactgattcccgcgggatcgcagggtataagttcaccttcaaggacgccggggtgcacactgtcgtgtgtaaagatctctccacaggctacaaggtcaccaaaaagattaacgtggtcaaaaagggtgaggggaaatcctatgaccagttcggcgtttcagaggatggcaaaacaatgctcgtgattggccggcccagcgcttctggcgagacagcgaagtatgggtacacatattacaagactgaggtggatagaacctgtcccatctgcgggagcaatgaactctactggagcatcttttgggcctccggtaataccgatggcggaacgttcccagagacacctagccgaccggcccattatgacgagggcaaccttgacggcatcatcatctgcatgcactacactggagatgacgagtactgcgacgccgactggtctgtgttcgggcataaccacgatgggagcggcagggacttgaagctcgtgtcaaagccagtccggtccagcgaaatagaggcatacctgctgaagagcggatactacgttaaagtatga

SEQ ID NO: 9292 - DNA, 1227 bp, synthetic construct
  source 1..1227: mol_type = other DNA
atgagttatgaaaatagtgctaggatcattaatgatgacatctttgatttggtgaacgaatgcttcggccaggaaaaaactagtcaaaacaacgagagccgcctgaacttcttcgatacgtacaagaattacttcgtgctgaccgacgatggatcttactctattaactcaaaggagataaatcataaagtcgaaaccctgcatacatctacaggtgccatcagcgagtccttcgagaagtttatcaaacctatgaaatttgactacaccaaagatatcgccatactcgacatttgcgccggactgggctacaatagctccgcagccatcgctgactttatcaagaatagcttcgattcaaatctgaaagtagacatggtggagatctcaaaagcgacctttgcctgtgggcttctggtcccatcccccatcccggaacacgacattacaaaaaaggctattgaagacgagctcatccggctcgattatgccactctgagcttagaggaatgtgagatccccgagaatattgacattaacgtgttcgtggaagatgccaggcagactgtccagaacctcgaggacaatacctatgatgcgatattcctagacccgttcagtcagaacatgacgccagagctcttctcactggagtttttcaaggagtttaagaggataatcaaagacaacggcattgtggccacatatacctcgagcgcacccgtcagagctgctttcatcgaagctggcttctacatcggtctcgggcccatttttggacgcaagcaggggggcacccttgcaagccctaatcctgaaatgctggattactccctacccaagaacgatgagatcagaatcgccctgagcgatgttggcatcccatttcgagaccctgacttgaacaagtccagtgacttcatcttaagcgaacggtctgaggaaaggcacaacgcacgtcacaacactaagatttcgtctgccgtaaaaacaccaatatttctgggggatgcgatggagaacgatgagaagcttaaacgccgagttgaacggaacctcattaagatgaatattccaagcactacctcccccgaggcattctacatcatcgagtgcgagaagaagtactccgaaaagcaagaccgcgagaacaactccaccgccagaatattggacatgaagaagcggctggagaaagtgaaggacggagactatacgctgacatga

SEQ ID NO: 9293 - DNA, 1977 bp, synthetic construct
  source 1..1977: mol_type = other DNA
atgttcgagatcaaggcaaaagacaacatgggtcgtgtgggagtgttaaagactaaacacggcaatgtcaagacccccgccttgatgccagtgatccatcctagaaagcaggccattgacgttgggaaatatggggctgacatcgttattactaacgcttacctgatctacaaggatgaggagctgaaacagaaggctatcgacgaaggactgcataagctcattaacttcgatggtcccataatgaccgactcgggctccttccagctgtccgtctatggcgatgtggagatcacgaacagggaagtgattgagtttcaggagtcaattaagaccgacattggcacaagcctagatattccaacagccccttttgtggacagggaaaaggcggaaagcgatctgaagatcacactggaacgtgcaaaggaggccgtcgagtttaagaaggagaataacatcgaaatgctgctgaacagtgttgtgcagggctcaacatatctcgacctgaggcaggactgcgcccgccaactctccaaactcgacgcggacctctaccctattggcgcggtggtgcctcttatggagtcctaccactacaaggatctggtggatgtagtgatgaatagtatgaaagaactgtccgacagtgtgccccggcacttgatgggggcgggacatcctatgatctttgccttgtgcgctgcaatgggatgcgaccttttcgattcggcagcctacatcctctatgcagaggacgaccgcttcctgaccacgcgcggaacctacaagctggagaacctgcacgaaatgccatgcagctgtgaggtctgcactaaatacacccccgacgacctgagggccatgcccaagaagcaacgaagagatcttatcgcccagcacaacctccatgtctcttttgcagagctccggcgcatccgacaggctatctacgagggcagtctgatggaactcgtcgaggaacgctgtcgagcccaccccgccctcctggatgcggtaagacagcttggaatgtatgcctgcgacctggagaagtacgacccgagaagcaaaaagtccgcattcttctacaccggacctgaaagcctgggaagaagcgaagtcttgaggcacatccagaagctaatggcaatgcccaagaagagggaccttattttactgcccccaagccggaagccatattctaagttcatctcagggaaactcggtgacttttaccgatacggcgaggaacacgatatcgacttggataatgctgacttcatggtggtcgatgttcccttcggtctgatccctcttgaggtggatgaggtgtatccgttgtcccaaaatagcactccaaagatcagagatgtagatgccgtggagtttttacaggaatttgtggatgagtttagcggctattatgaacaggtcttaatacactcccgcgttctgaaggacctagagatagagggggaaaacaacctggttgatgccgagatccgctacgctaaagatgacgtgaaaaagataaaggctatcgccgactaccagttcggggtgggcgcgggggaagccctctttgacggcaacatcaacattgagaaaagtaagaaaaccgggaaaataagacacatctacgatggcaaaacattgattgtcaatatgcgggcctcggactccttcttggtgctgagcaaagaaggggctcggcggctccatgctgccatgccgtcacttagtaacagggtggttgtaaacaaggactcagagccattcgcactcgatggcaaaagcgtattctgcaaattcgtcgtggactgtgacgacaatatacggtctaatgatgaggtgctgattgtcaatgaagaggatgagctgctggcttatggtaaggcactacttggagcctgtgaaattaaggagctgaagacgggccaagccattaaaacacggaaagggatgaaaaagtga

SEQ ID NO: 9294 - DNA, 669 bp, synthetic construct
  source 1..669: mol_type = other DNA
atggtggataacgataaggtcaatacggggcacaatattgaagataaggaacttatcaaaaatgcaagaaagccggtgggggagctgggacatcagatcctcgacaggatgaacaaatcccatgagtccatggcgcagtggggagtcagccacttcgaagtaaaggaggacagcaagatcctggacatcggctgtggcggcggcaagaacattgaacggttcgccaagcagatttcgcaaaacggccgcgtggttggtattgactacagtgaggtcagtgtggaaaaatccgccaaactcaaccagaagttcatagatgggggaattgtgaatgttctgcagggaagcgtgtcagacatgccatttcacgatgaaacctttgatatcgtcacagggtttgagaccatctatttctggcccgacttcataaatgacttaaaggaggtgaacagggttctgaagaatgatggtatcgtatttttctgcaacgaggccgtctaccgcgaaggcgagatggagaaatacgacgacttggtggagctgctcgacatgaagatctatagcgaggaggtgctacgaaactcattggaaaaaacagggtttaaagacttcaaggcttacctgaacgacgagaacgattggatctgcgtgactgcacggaaaatatga

SEQ ID NO: 9295 - DNA, 1428 bp, synthetic construct
  source 1..1428: mol_type = other DNA
atggccaaccaggtaaagaccatatttgctaacatgagtttcatgctagtcagccagatcatcgctagtgtctgtgcttttgtgtggaccattgttacggcctggtacctggggccgagcgactacggcgtgttcggtgccgccgtcagttttgctgcactttttgggattgtgatcgactttggcctctccacctatgtcgtgcgggccattagcacggattttgcgaatgaacataagtacctggacaacgcaatcagccttaagctgttcctgtccgtgttttacgtaattgctgtgtacctctccgtattggtcatgggttggcagcctaaattggtgttagcctgcgtcttcctagcctttgagaatgttatcaaatcttaccatgctatcttatttactagcttccaagcacacgagaaaatgaaataccaagccgttaccaacaccgtcatcaatgtgttcacactgatattcatactcctagtggcatgcactgattacgccctggttggaatcttaatggcttatattgtggcaaacgcattggggttgttctacgaggtgtatgccctccggaagcacattatcaaacccaaactctcgttcgatttttccttctacaaggccctgctgaaggccggactgcctttcgctctaaccggcctcttctatacagtgtattacagcatagaccttgtcatgattacacaattttccacgacttatgcaaccggactttataatagcgcctataagctcatcacagtgctgaccctcttctatacaatctacacctctgtgattttccccgtgatgagtaagctgttcaccgatgagaaggacctcttgaacctgtcctttgtaaagtcaattaaatacctgatgctggtcactatcccaatcgccgtgtttacgtcattctacagctatcagatcatcgcgatttacggggcggaatacatagaggccgggggcgtgctgcagatactgatctggacagtctgcttcctgttcgtgaacggcgcgtgttcactcgtcttgaatgcttcacaccaggaatacagcgtgacaaagatctataccatcgccgcccttttcaatgtggttctcaatctggccctcattccaaagtattccgtttacggcgcttcggtggcaaccgttttaagtgagatcctgatcctggtcttggaactgtacatgcttggaaaaatcaaccagctgcccgaccgccacctcattcacgacatcctcaggatcattttcgcaagcctggtcatgggcactgttctgtatgtgcttgacctgaacatatgggcggctattgcggtaagcgtggtggtctactttgccgtgatcgtgctgatcaaaactgtggatagcgaggataagctgataattcgacagattatcaacagatga

SEQ ID NO: 9296 - DNA, 1038 bp, synthetic construct
  source 1..1038: mol_type = other DNA
atggtgggaatcgtaggctatggggcctatgtgcccagttatcgaattaaggtcgaggaaatcgccaaggtgtggggcgatgaccctgtcgccctgtcacggggactcatcgtgaacgaaaagtccgtcccctcatccgacgaggataccgcaacaatcgccgtgactgctgctcggtacgctctagcacgggctcagattgacccaaagaatattggggcggtgtacgtcgggtccgaaagccacccttatgcagtaaagccaacggcctcaattgtggctgaagcagtgtgcgcaactccaaagttaactgccgcggacctggagtttgcctgtaaagccggcacggctggcattcaaatgtctatgggacttgtacagtccgacatggtggactatgctctcgccatcggagccgacacaagccagggcgcacccggcgatgcgctggagtacaccgcatcggcgggcggggccgcctatattataggtaacgacaacactgtggccgacatcgaacacacatgcagctacacaactgacaccccagatttttaccgcagggagggggagccctacccatctcatggtggccgtttcacaggagagccggcctactttaagcatgttctgagcgctgccgagatgctgttcgatgaaaccaataccgccgcggaggactacgactacgcttgcttccaccagcctaacgggaagttctacctgagggcaggtaaaaagcttggcttcacctctgagcagatcgaaagaggactgctcacccccaacattggaaacacgtactccggtgccgtccctctcgcgttgtcgaatatactggatgttgccgagcccggagataagatatttgttatcagctatggcagcggggccggcagtgacggcttcgcaataaccgtcaaagatgagatcgaagagcgcagagagttggctccgaaaacagaagacatcatcagtaaaaagacctacgtggattatgctgtgtacgccaaattcaaagggaagatcaaaatgtga

SEQ ID NO: 9297 - DNA, 1158 bp, synthetic construct
  source 1..1158: mol_type = other DNA
atgcgggacgtggctattgtaggcgtgtcacaaacaaaattcggcgagctttgggatagcagttttcgcgacctgatcgccgaagcaggggtaaaagcactggtggatgccgagatcgatggggcagacatcgaagcaatgtttgtcggaaatatgtccagcggactttttgtcgagcaggaacacatcgccgctctgataagcgaccatgtgggccttaaccccatccccaccacacgagtggaagctgcctgcgcctccggcggtctcgctctgagacagggaatcatggctgtggccagcggcttccatgatgtggtgattagcgcaggggtggagaaaatgaccgacgtcgtggatgctacccctgctattgccacggccagtgacaaagaatgggaggcccagcagggggctactttcccatcactatacgcaatgattgccaaaaggcacatgtatgagtacggtactacccgggagcagctggcgcagtttagcgtagtcaatcacaagaatgcaagcaagaacccgaacgcacaattcccgtttgagattaccgtcgataaggttttgaacgccaccatggtcgcggaccccttgaccctattcgactgttcccctgtgtctgacggggcggccgccgttgttatggtgcctgcggaagatgctaagaagtacactgacacgccaatctatgtcaaagccagcgcccaggctagtggaactctgacactgcatgacagaaaggacttaacgaccattgaatcgacaaaggtcgcctcccggaaggcctacgaaatggctggcgtgacacagaaggatattgacctgactgaggtgcatgactgcttctcaatcaatggcttgctcgccgttgaagacctcggatttgcggagaagggtaaggggggaatagctatcgaagagggccagacagagatcgatggcgatttcccaatcaacacatccggcggcctgaaagcacgcggccaccccctcggcgcaaccggcatcgctcaggccgccgaggtggtttggcagctcaggggggaggccggtgcacgtcaagtggacggggccgagatagggatgacccacaacatcggagggaccggaggtacggccgcggtacacatattcggacgcgatctgtga

SEQ ID NO: 9298 - DNA, 924 bp, synthetic construct
  source 1..924: mol_type = other DNA
atgatcatcaacaccgggtcccgcactgacattcccgcgtttttcagtaaatggcttctgaacaggatcgatgagggctccgtctgcaccagaaacccctacaacgacgatatttacaagtacccgttggatagtaagataattgactgcctctgtttctgtaccaagaatccaaaaccgatgatcgctagcctggataagctggatgatttccgccagtactggtttgtcacaataactccttatgggaaggacatggaacccaatgtgccagggtataaaaacgtaatgaaatcattcaaaaagctatctgagcatttgggcatcggcaaggtgtcctggcggtacgaccccattttcatatctgagaaatacaatctggatttccatatcgagatgtttgataagatggcctcggaacttggggactacacgaatgactgtacaatcagtttcattgacctgtatcaaaaggtcctccggaactttcccaacagcaaggaggtgacccaggacgaacagctcattatcggccgagaattttccaagacagccaacgaacacaacattaaaatgaaaacctgtgttgagggaacgctcctggaccagttcggctttgatagccggggatgcatgactcaggaggttatcgaaaaggcaattggtaaaaacctaaagatccctaagggcaagtaccgcatccgtgaatgcgactgtatattcggaagggacatcggcgcatataatacctgcctgcacggatgcaagtactgctatgccaacaccaacatgaagctggtgaaaaagaatcaaaagctgcacaatagcaattcaccattactcatcggggacgtgaaagagggtgatgtggtcaaagaggtgagggagcctagctatatcgacacacagcagagattcatttga

SEQ ID NO: 9299 - DNA, 1203 bp, synthetic construct
  source 1..1203: mol_type = other DNA
atgatcatccagcggaaagactacatcgacaagattaacccttttgtgaataagcacatcatcaaagttctgatcggagctagacggtccggcaagtcaaccatattaaaacagatcattgatagcctcataaagcaaggcaccccaaaggagaacatcgtgtggatgaacttcgaactcagtgattatttcgaaatggataatatcaagaagcttgaggagttcattagcaacaaaactgaaaatattgatggtaagatctacctattcttcgatgagatacagatcgtgccccagtgggaaaagttgatcaactcgtactttgccaaggagaattatgacatatacattaccgggtcaaacagcaaactgctgtccggcgagtttgctacatacctctccggccgctatgtggaactcaacatatatccattttcgttcagggagtaccttgagtactatgaaattacgagcgacttcaaatctcatttctaccgctatctggaagacggggggatgcctagcacattcgactacaggggcgacgataaaagactaatcctgattgacctgtacaacagtattgtccttaaagatatcatccaacgaaataacgttaagaatgtggacctgttggaccggattatgagatttgtcatgtacaacattagccagcccttctccgccaacaagattcacaaacgcctaaagcaggacatggtaaacctgtctgtaaatacaatttacaattatctgaagttctttgagaatgcatgcctgatttatcaggtcaagcgcgaggatctgcaggggaaacgtatcttaaagcacgatgaaaagtactacatatgtgacctcggattccggcaggcaataatcggcaacaaccagcgagatatcactcgggccatcgagaacattgtttatctggagcttctgcgaagaggatacgagatcaccatcggtaaggtggacaacctggaagtggactttgtgtgcaaaaaacaaaataaactcatttacatccaggtctcctatctcctcgccagtgaggagaccatcgaaagggaatttaagccgttgaataacatctcagataattatcccaagtacgtcataacgatggacgatgcggacatgtctcatgatggaatcattcacctgaacctgatcgactttttgagggacaacgaggtgatctga

SEQ ID NO: 9300 - DNA, 1191 bp, synthetic construct
  source 1..1191: mol_type = other DNA
atggacgagattgcctccattacggatacaaacctgaccgaaacacagtttttcaatcgaagagacgagatcaacatcctgtcaaacctattgatctctactgagtttaactccgcacccacgattctcctcaccggcattcgcggagtgggcaaaactgccctcatcaaaaagatccgcaataagttcgagagggaatacctcgtggtcgatatcgatttatcccgatctagtgcataccagcagaaaaatctcacaagggcttctatgatcaagataatctacgacagcatcatccggtcgtccaaagagtttggccttaagacaatcagcaatcagatagaaaagtattttaaaaccaagaacttcaagatagacaaactcttaagttacgagcacatccccatcccaatcttcgagagcgaagacaactacgagagattggcggagtttgtaatggagctgcctcagaaaatttatgaggacaataacgataagatcaagggagtcttcatattcattgatgaaatccaactgatcaaagatttgggggatgaattgaacggcttcctgtggtacatgcgcagtttcattcaaacccagaagaatgtggcttacatcttttgcggaagcatgagcctgaaggacagtctgattaacgacctgaatgggaataagggggcctttggagggaggatgctgaccattgaggttcagccattctccaaaaagaccactgagaactacatcaagtcaatgcggcggaacatccaactagaccacgggggttttgaaagattctacaagtgtacgcgtggcatcccttattacatcaacatatttgcgaaatacctgcctgaaaacctgaccctgagtgagaacaacatcagcgagctcttcaaggactcaattgattatctggccatccatttcgtctacatgtggtccaaactgaccttccaggaacagaagatcattatttcgctccttgagaatcccaaaaagagaatagaagtggctaattccctcaaagtgactagcggctcactaaacaggcccctgaaccgccttctggactatgatcttattgagtatgccaatgacaagtatcagattacagacccgatatttggttattggctgaagaacagctatgaaaagaatggcatttacccattccggagcatttga

SEQ ID NO: 9301 - DNA, 918 bp, synthetic construct
  source 1..918: mol_type = other DNA
atgccgatatataacattgacggggaaacactcactcccatcaaacaggtcaagttcaagaacgaaagggagctgcagatactgaccgagaagaaccttgaagagctattcgggttaaagttcatcgccacggagtttcaggtggacaacctccgaatagacacactcgccttcaatgaagagaccaactctttcgtcattattgaatacaagaatgtaaaaaactatagtgtgatcgaccagggctacagctatctctccctcttgcttaataacaaggccgagttcgtgctgaagtacaatcttgtttgcaatgcggcattatccaaagatgagtttgattttagccagaccaatgtcatgtttatcagcccaagctacacgacataccaactgcggagtgtggaattttcggatatagctttcgaactgtggaaggtagtgaaatattccaacggaactgttctgttcgacaaagtgaacaataccgatacccaggctagcatcaaacaaattaccaaagaaaacacaagtaaggataaggtcaataaggagatcaagaaatacacggaggaggataccctgatgaacaagtccgatgacattaaatctttgtacgataatctcaaggaactaatcctgtccaactatgatgacattgagatcaaccactggaaatattatgttgccatcaaggtgaataacaagatggtggcaactgtcagtgtgctgtcaaaatcattgaagacatggatcaatctgaaggagactgagctgcgcgactccgaaggcaaagtgagaaacgtgtcaaacattggacatcacggcgtaggtgactacgagtacgtcatctcgagcgaggacgacctgtactacttcaacaagctgtttaagcagagctacgacgagaaaatctga

SEQ ID NO: 9302 - DNA, 696 bp, synthetic construct
  source 1..696: mol_type = other DNA
atgaaaattgtgacttggaatgccaacgggaaattcagtgagaagtttccagccattctggagaaggacgcagacatctatgtgatccaggagtgcgaaaaccccgagataatcaatctgaaggagtatagcgagttttcttccaactattactgggttggggagaaccaatattacggccttggcatatttgctaaagataatgtgaagctggagctggtcgacttggacgataagggactccgctacttcatccccttcacagtgaacgatgactttaacctgctgggagtgtggaccaaccccgatatggacggcaccaaaacaatttattaccctaaggaaataaccaaatactacgaggaacacaaggatagtggattcttcaatgaagacatgatcatctgcggcgattttaattgtgatgtccggttaaagggcactcacgccaagaacgtttacgaagtgatcgaaaagctctccgagtgcggtctggtagacatttatcaccatctcaccggggagaacgaaggggaggagacgacgccaacattctacatgtacaggcacctggacaagccttaccacctggatcatatcttctcgtcaagcgataaggtgaaagcgttggaaattggtgacgcagacaaatggctacagcttagcgaccatgtcccgctcatcttcaaaatttga

SEQ ID NO: 9303 - DNA, 1452 bp, synthetic construct
  source 1..1452: mol_type = other DNA
atgttcgagaaggaagagctgatcactaatttcattaaggaggaactgacggatgtacccaatatcctcaacaaagagttaagcaaaaacaacgagaagttcaactcccgagaggagctggacgagattaaaggatacatggacacgtttttaaacgaagatacaagcaacaagatcatagttctgccgggcctcaggggcgtgggcaagaccacgctggtgctgcaggcctatgaatacctcctcaaagaacgcgacatccctcccagtaatgtcctctacatctcctttgacgatctcaatgatctggttgaatgcagtatccggcagatggtggagatttacctgaagaacatttttcatgcaaacattcgcaatttggacgagaaggttttcatattcgtcgacgagtcacaaaccgacaagaattgggctctttccgggaaggtcatatacgacaaaagctataacattttcatgatctttaccggtagtagcgctcttcatctggaacgcagcgatgagcttgccagacgaatgcgcaaaaaatccgtaactcccctaaactacacccagcacctgaagctgaagtacggcattgatgtgggaagtctatctgatgatctcagagagctggtattcaccggaaatattgacaatgcggccgcctcggagtttgaggccaataacctcttgaccaactgtttggattactctagtactgattgggacgagtattataagttcggcgggtttcccatattattcgacaagaagtcgcacagggaaatctgtgaggacctggtggaaatcacagagagggtcatcactaaggacatgccgcagataaaagagatctccagcgaaaatcagtccaatgcaaagcgtatcctgcggtacctcgccctccaacagcctggtgagctcacacaggcgaatctggcaaattacctgaaaacctcaaccgctaatgtcaacaagattttggacttgcttgaaaaaactcacctgatcttccactgcgaaccttatggcggttcagccaagcgggtgaaaaagagctggaaatattattttgccgctcccagcatcagacacgccctgtcagctaaaattgggaacccactgctgggaaccgacgattatgaggggctgcttctggaaaaccttgtcgcgtctaacttgttcaacctctccaacaggcaattcacaaatttcacagtgtactacgacgcagacaaaaagcggaacgtggatttcctgatccataaggacagcgagaacatcatcccaatcgaggtggggcggggaaagaaaaagaaactgcagatcaaacacgccattaacagatacgactgcgaatacggcatcgtggtggcaaacaactacagctctctaaagaaggatgacgatgtgatttatatatctccaaagacattttcctttctatga

SEQ ID NO: 9304 - DNA, 1440 bp, synthetic construct
  source 1..1440: mol_type = other DNA
atggaagacgtcatctataactatcttatcaaacagctgagcgaagtgcctatgattctaaaccgccggctgagctacaagaacatcaagttcaacaacaagaacgagtttgacaagctccggttgatgattgacagttttctggatggggaatctgaggagagatactttgtgctgccgggaattaggggggtggggaagacaacaatcctttaccaatgctacgagtacctgttaaaggaaaaaaacttcaatagctccgacctgctttacatttcatgtgagactactaatttcgccggggagacggatatcaaaaaaataatagagatttatctggatgaaattcacaatacgtcccccgccctgctggataggcctgtcttcattttcatagatgaagcgcactttgacatgaattgggctatgaacgggaagaccctctatgatgagtccccatacattttcctgatactggccggttcaagctcccttcatttgaattacaattctgatgctgcccgacggctcaatatcctgcctgtcatgcccctgaactactcccagcaccttagcctgaagtacaactaccagaccgacatcggcaatgacctcatcgacttgatattcacaggcaacattgaggccgcccaggaaaaggaactcaaaatccagaaggaccttattagcttaaatagttatccactgaatgactggaacatttatttgaactatggcggctttccagcaaccttcaacatcaaattcgaggacatcattgtatctaaactctggacaatcatctccaaggtaattactgtcgacatggcgaatgtcttcaatctcaacaagaacaatcagaacctggcttataagaccttggtgtacctggccagccaaaaaccgggagagatctcacatgacaagctgagcaactacttggattgcggcaaaactaccataaacaatattatcaacaccctcgagaagacgcaactgatatttcacagtgaagcttacggtggcgcttccaaaaaagttaagaagccctggaaatacaatctcgccactccaagtatccgtaactgcatcaacatcaaattcggaaacagcgcaggatcaaagagtgaatatgagggtatcttactggaaaaccagattgcgtctaatctatttaacctaaacaacaataacaccagctttgacttcaatgtgtattacgattcgcagaagggaggcgtggactttatcgttaagaaactgtttggcaatgcaatccccatcgagtccgggataggcagcaaaacccgcagacagatcaagaaggccatgaacaaatatgacgcagattacggaattgtggtgtcgaataagacagatttcatcgagaaggaggacgatgtgatcttcatccctcccaagaccttcacatttctctga

SEQ ID NO: 9305 - DNA, 456 bp, synthetic construct
  source 1..456: mol_type = other DNA
atgtctaagctgctgatcgattcatccttcatcattgcattgtttcggaaaaatgatggcctgcaccagaaggccattgagaacaaggacatgctgaataacgactgttacatcaccgacggtatattggcggaagtgatgacgattatcggccagaaaacaaaggacatcgggctcgtgaggacagtgtacaattatctaaaggacaacttcaccatcattcacgagtcggagatcagcatgtacaatgacaacgtgctctccgttttcgaaaaatacaaccagaatagctttaaggtctcctttatcgattgcagccaggtcattatctataatcattacaacctggattatgtaatcagtctggacaacggatttgggcttttcgaggaaatagagttaaaaaacctcagtgaacagaagcgcactatacaattcattaaatacaacatctga

SEQ ID NO: 9306 - DNA, 243 bp, synthetic construct
  source 1..243: mol_type = other DNA
atggacaacatactagcgacgacaaccctttataaaaactaccagctggccatccccaaggtcattcgcagccagtttaaggagctgaactccaaagacaccgtgattgactggttcatcaatgaggaaaatgaaatcatcataaagccgagaaagaaagtaagtctggaggatgtgatcggcatcattgaagatgatgacccacggaacgcagtggagctcaaaaggagcctctacaagtga

SEQ ID NO: 9307 - DNA, 120 bp, synthetic construct
  source 1..120: mol_type = other DNA
atgaagctggtcaaacggaatcagaagttgcatagcccggatctcccactgctgataggcgacgtggtgaaagaggtaagcgaacccgccatcctaacccacaacaagaggctcttctga

SEQ ID NO: 9308 - DNA, 1239 bp, synthetic construct
  source 1..1239: mol_type = other DNA
atggtcaaacgagagctttacctcgagaagatttacaatttcatgggcaagaacctgataaagatcatcacgggcatgcgccgttgcggcaagtcctacctgttcaagctgattatccacgaacttaagaaacgggggaccaaggatgaggacatcctcctaatagacctggagctgcccacctacaaccacattaagacacgggaacagctagacgagattgtggtgccgttcatcgaatcccatgagaacaaagtttatctgttctttgatgaaatccaaaacgtgaaggaatgggaagtcagtatcaacagctactacaagctcgagaacaccgacatctacattacaggtagcaacagcaagttaatgtctgcggagtttgccaccctgctgacgggacggtacgtaaacatcgagctctatccattctcattcaacgagtttctggattataagcaggaactgaatcaccccccttccatcacaaatgaactcaatagtgatttggaaaactttttcgaggaataccagaagtacggcggaatccccctcaccataagctcccagcacgacaaggagctcgtgctgaatgggatttactctagcatcatcctgaacgacatcgttgagagatatgaaattaggaatgtggggttgttcaatagaattgtgaaatatataattgagaacacagggaatctgatatcggcaaatgccgtatacaaatacttgaagcatgagaaacttcgcattacaaaaccaaccatctacaactacctggagtatcttgaaaacgcatacctcattgctaaggcctcaaaagaagacattgctggaaaaaaggagattatcggctctgagaaatattatctgctcgacactggtttttataagagccagcttgaggagaagcagagaaatatcgaccacatactggaaaacatcatattcatcgagttaaagcgacatggatataagatcacgatagggaaagtcaatgactatgaaatcgacttcatctgtaagaaaaacaaccagaaaatctacatccaggtgacctatctactggagaatgatgaaactattgagagggagtttaggccactgttgatgattaaagataattaccccaaatacgtgctgagtatggatcgcactgtccaacctcaaaatggcatcaagcacatgaacatcattgacttcttgaagaactttaaccatgatgagatcttttga

SEQ ID NO: 9309 - DNA, 1188 bp, synthetic construct
  source 1..1188: mol_type = other DNA
atgagcattgtgcccctgcacatcccaattaatgaaatcgaccgttacttctataaccggacggaggatattaaaaagatcgagtactacctaaattcgttggaaatcggcataagccaatcactgctgatccgcggagtgagaggtgtcggtaagaccttcctgcttcagaaactcaaacaggactcaaagaagaactttctggtgtcctacatcgatatctcaagaattgtgggcatcgatgatacgcagctgactgcccagagtgtgctcctggagctgttggacgaaatgaacaatacaatctacgataagatacatgacgggaagaaagtcacgttccttctcaagaagttaattgacaaactgaaaattaaagatttcagctttagcaaaggcatccatatggctgagataccgatacccgccaccgaggacaattacaagaaaatcagtaagtttgtaatggaatatcctcaaaatgttgttgaaagtattgatggcattaacggcttcatcattataattgatgagtttcagatgcttaaaaagttgaagaatcccgagtccttcttctggttgatgcgaagttattcccagttccagtccaacgtcagctacgtgatgagcggcagcatcagccaaacatccgatgcaatcgaaatgctcaacggagcgaccggagcctttggtggcaggatgatgcagatcaacatcgaccctttcacaaagcacgaaaccaagtcttacttcaacgaccggtttccagaaatcaagttcactgacgacgggtttaaccggttttatgagtacacaaaaggaatccccatgtatataaacagcttttacaatgcactctcatcccacgagacctacgacgaaaagtcgatagactatatcttcctcaataacatggaccagattcttgtcatgtggattcgcatctgggggactctcaacaaatacgagaaaaagatcatctgcgccatgttaaacaaagagaacatttcctggtctaagctggagaggagtctggacatgtctccagctaccctgaccaagtatattaaaactctacaggataagggaatcatcaagtaccacgatgggaactataatttcgaggacctgatgctgaagacatggctgaacaatgagaaggagaggaccggggtgtatcctcagtga

SEQ ID NO: 9310 - DNA, 1530 bp, synthetic construct
  source 1..1530: mol_type = other DNA
atgacaaactgcatcatggtgcaaggcacctcctccaacgctggaaagagtatgctggtagctgcattgtgtcgaatatacaagaaccggggatacaaggtagctcctttcaagagccagaacatgtctctgaactcatacaccaccaaggaaaatggggaaattggaatagcccagatgctccaggcggaggcggcgatggttgagcccagcatacacatgaaccccgtgctgctcaagccaaagggagatttcacctcaaatgtgattatccagggtaaatccatcggggacatggatttctacgactaccagcataagtaccatgataccgcccttgaggctataaaggaaagcttcaatattctcaaggaggagtacgacgtgatcattattgagggcgccgggtctcctgctgagatcaatatgcgggaccaggacatcgccaacatggaaattgcacacctggcagacgcgaatgtgattctgatcgccgatatcgaaatgggcggggttttcgccgccattgcaggaacttacgtgttgctggacgattatgacaggtcgcggcttaaagctactgtcatcaacaagtttaggggcaatctggacatcttaaagcccgggctggacaggatcgaagagatcaccggcgagcccgtgttgggagtgctcccttatgacgaaactcttaaattgcctgaagaggattccgcctcactaaccacgcatagcttcgcggaggataaggacatcacaattggcgtcattcggcttccaaaaatcgccaacttcacggacattgacccgtttgagtatgaagacgatgtggccctgaaaatgattgacatcaacgacaacatcagtgatgtggatgctatcataattcccggcacacgcaacagtacagaggacatgtttgaactccgcaagagcggtctggccgaccagataatcaagaaagccgatgaaatcccaataatcgggatatgcggcggcctgcagattctgggaaatgtcatttatgatgatgagaagagggaaagcaaacacggaacagtcaatgggctcggcctgctggatatcgagtctgaattttcaagagcagacaagatcgtcacccaatcggaggccacgatcccggacaatctcgatgggatcgctggtgcaattttcaagaacatcgcaggtgaaagcattacaggctatgagatccacgaggggaccagtgagctactgagctctaaagctttactgaatgttaaaaaaggacagggaaacaatgacgagggcatgattgacggggcatgcaatggcaacatctttgccacttactttcacggtatattccacaactacaacttccgaagagagtttcttaactacatccgtacgaagaaaggcctagaggcccgctacggtgaggacccatatgagactcaaaaagactattccctcaacagactggccgagattgtggaagaaaatttggatatggatatcatcgatgacctgctcttctccaagtga

SEQ ID NO: 9311 - DNA, 1980 bp, synthetic construct
  source 1..1980: mol_type = other DNA
atgaagtttgaggaagtcgagataactgaagattcacctcaggagttggtggcggagcccgtggtggagaaggaagaccacggcgaagagaccaaaccaatgctggactacgacaatattaagagttcacaggatattgaggttccacctctactgattgaccaggtgatagggcacgaggactccatagaaacaattaagaaggccgccaagcagagaaggaacgttctgctaatcggcgatcccggcgtgggaaaatccatgcttgctaagggaatggcgcaaatcctgcctcacgagaccttaaaggacgtactggtctacccgaacatggaggataacaaccacccgttgatacgcacagtgcctgcaggggaggggaagaagattgttaaggctacgaaggggtccgctaaaagccatgaagaaaagaagactatcattacaatgttcgcaatcggcggcattctggtaatcggattcatgtacggacggctgctggaatctattattgcagccgccctgatcctgcttatttccattcagatcaagccaaaaaacagcaatatgtcccccaagctcttggttaacaatcaggacagcagattcgcgcccttcatggacgccaccggttcgcatgctggtgccctcttgggggatgtacggcatgacccataccagtccggaggccttggcactcccgcacatgaacgtgtggaggcaggtatgatccacaaagctaatcggggagtgctctacatcgatgagatcgggacaatgtctatgaagacccagcaggagctgttgtcggccatgcaggaaaagcagtatgccatcacaggccaaagtgaaaactcaagcggggccatggtacgatcacaggcagtcccatgcgactttgtgctggtcgcctccgggaacctgcaagttctggagggcatgcacattgccatgaggtcgcgcatcagaggctatggctatgaggtgttcatgaaggactacatggaagacactactgagaaccgggagaagctggtccagttcgtagctcaggaggtgaaaaacgatggacgcatccctcactttgccacggatgccctcgatgaaataatcatggaggccaagcggcgatccggcaagcagaatgccttaacgctgcgcctccgcgacctcggtggactggtcaggagcgcaggggatgtggcgatagaaaaaggagccaaccttgtcaccgctgagcacgtctttgaagctaaaaagtatgcaagaacactcgaacagcaaatagctgacaggtccatcttacagagaaaggactacagcatggtgtccgcgcaggggggacgagtgggtctgattaacggccttgcagtgatcggtgacaggagcggaatcgtttctcccattgccgcagaagccgctccgacccaaagtaaaaccggcgggaagatcattgccaccggcaaactgggcgagatcgctaacgaatctgtgcagaatgtcagtgcactgatcaaaaaatacacgaataaggacatctcaaattatgacattcatgtgcagttcatccagacttacgacggcgtggagggggattctgccagcgtcagcattgccacagcggttatctcagctatcgaggagatccctatcgaccagactgtggccctcaccggtagcctgaatgtgcggggagatgtcatgcccatagggggcgccaccgccaaaatcgaggccgctgctgaagcgggaatgaaaaaggtgcttattcctaaaagcaacctgaaagatgtcatgatcgagaaaaaatatgaggacatgattgagatcatccccaccgagaccttgagtgatgtgctggaaaacatcctaattagtggctctagcaaagacaagctcatcgcaaaaatgaagaacctcagttctaaggtggccgataaggtgccccaaacaggtctcaacaatccaacgataaattga

SEQ ID NO: 9312 - DNA, 483 bp, synthetic construct
  source 1..483: mol_type = other DNA
atgaacatctacgagaccattaaaaacattcgcgccagctgcgataattacgtggacccaaacctgctggcattcatcattgatgacgacaaccatatgggagacaacaatatcctcgaaattaagggttatgatatccgggacaatgacgcctatgaggaaaggctgttcaagattcacaaaaacgaaaatatcttcctcccttgtggcatgattacattcatccccgtgctaaatgaatgtgacatattttccactaaggactatagcctgaagctttcaccggaggagtttgacaagtactgcgaacaggaggaaaagctgtttggcattttgataaaaaaagattccaccgattacaagatcgggcagacagatgtctgcaactgcagtatcacggcgtcgttcaaggagtttaaaaaggctgacgggaaattctacaaaaagatcgaggagataatcgagagcaagatcatcgattga

SEQ ID NO: 9313 - DNA, 906 bp, synthetic construct
  source 1..906: mol_type = other DNA
atgaaggtcaaggacgggatcatcggtctagtcgtcggggacgcactgggtgtgcccgtggagttctacaggcgagaagaccttgagaagaatcccgtgacaggcatgaaaagttatggaacatacaataagccagccggaacctggtctgatgatacttccctgacgatagccaccatggccagcatcataaacaaaaagtgcatcgactattcagatatcatggaggagtttattgaatggcggaagaataataaatactcccaggaggaaaccttcgacataggcattacaacccggaacgccctcgacagctacacgccaggcatcaacccgctgtgtggaatgggcggagagggcgacaatggaaatgggtctctgatgagaattttgcccctggcgttcatcggcaacatcgactatgagactatcgaaaacatcagctctttaacccacaggcatgagcgctcaagaattgcttgcgtactgtacgtggagattgcccggtccatgattagtaactccaacctgactataaacgagcacgttaaaaatgcaagcgctaaaatcattgaatattacaaggatagcgaagagctcagtaactttaagcgcatcttcgacgacgattactcgaaaggcgtgtcagggaagggctatgtgatctccacctttgaagcggtgatctactgcctggaaaacacaaataactataaggatgcagttctgaaggctgtgaacttgggggatgacaccgatacggtcgctgccatctgcggtggacttgcaggcatctactacgggttcgacgaaattcctatagagtggattagcgagattcgtcagatcgagacaattatcgacctctgtgaaaaatacgaggtagcctgtgatgagtatctctga

SEQ ID NO: 9314 - DNA, 510 bp, synthetic construct
  source 1..510: mol_type = other DNA
atgatttttaagactgccaacctcacactacgaccatggcaaatctccgatgcggagtgcctgtatcacttcgccaagaaccccaacatcggtccgatcgcgggctggcctccacatgagagcgtcgaggactccttaaacatcattcagacggtatttagcaaaaaggagacctacgccgtggtgatagataacgtgcccattggctgtgtgggacttttgttccaccccgactgcaatcactattggggggataactcggctgagctggggtactggattgccgaagagtattgggggaatggatacgctgttgaaggcagcgaggtcctgatcaagagagcattcgaggacttcaacataaaccagatctacgcaacctacaggtgcgaaaatacccggtcaaaacgcgtgctcgaaaaactcaattttaaatattttgacaacctgacaaatgtcaattacctgggcgaccagttcagtgaaatcgccatggtgctgaagaagtga

SEQ ID NO: 9315 - DNA, 369 bp, synthetic construct
  source 1..369: mol_type = other DNA
atgacacgcctctgcaaaaactgcggatttgaaaaccaggacgattacgacttctgtgctaaatgcggcacccccctggttgagggcctaaagcctaaccagttccgggtctacaggacacaagacctcgagattaataagaaggccctgatagccgcctacatcgccactatattcctcagctggagtggcttttttatcgggctgatctcaaaaaatacggtgtttgcaaccttcaccttcttcggatttttcatgccattcttcctggtgcagagcaaacacccggcacttaagaagcacggtctgatcatgatggcgatttcttttgtcggggtggctttgtccttctatgtaatgatgcattga

SEQ ID NO: 9316 - DNA, 513 bp, synthetic construct
  source 1..513: mol_type = other DNA
atgaagaaactaaatgtcgcccttatagcattggtactgatcgttgtggccttcctggcttccacgattgtgagcccggtgctgatcgtggcggaggacgcatctgaagacaatgggattgacatggctgcgaccattggtctcaccggcttcaactggatctatcccggcaactcggttaacgctcaggggcaaacactgcacaacgtgtacgcggactaccctgataatccatatggagccgcccgcgacataatgagttacacataccatgtcaccccacacatcataatttccattaacaatgatgccgctgcagccattttcggcgaaaacatcatcgatgatatcagggctaacgatgggtacaacggctatgccggtaacgacaaggtgtcaggaagcatggaccggggagacgccgtgggcactgccatggcagagaatggaatcaatatcattgagatccccatacagtttctcatcgggaacatcagcccccactttgtctga

SEQ ID NO: 9317 - DNA, 918 bp, synthetic construct
  source 1..918: mol_type = other DNA
atgatcatcggtggcagctcctcccaggatctggccgcgagtgtcgcacgcgagctgggcgaagaactatgttatgtcgagaccaggaagttcccggatggagagagatacctgaagattaatggccacgtggaagatgaggccgtcactgtcatccaatcaactggataccctcaggacgagaatctcatggaattgctgttcataatagctaacctgaaggacttaggtgccaagaaagtgaaagtggtagtgccatacatgggctatgcacgacaggaaaagcgtttcaaccccggcgagaccatttcggctaagattgtttgcgacctcatccagacagtgggggctgatgaatttataacatttaacattcacgaggcctgcgtgctcgactttttcgacatacccgcacgcaatctgtccgcaatgcccgctatcgccgagtacctggacaagaaattctttaagaaagaagagcttaaaccactaatcgtggcccctgacaaaggggcctatggattcgcacaagaaataagcgaaattattgggtgcgactgtacctaccttactaaagttcggctcggacccgataaggttgagaccaaaatcgtagatgtccggtgcgacagcgagtccgagaacacggtgaacattgactctgtgaagggcatgcacgcgatcattgttgatgacattatcgccacggggggaacaatcgtcaacgcagtaaacatcctgaagcagtatggcgctagcgcggtggatgtgtgctgtgtgcatccaattctgacaaacaatggggtgacgagaatctactctgccggtgccagtaagatcatcggcaccaataccctctctagcgacacctcacgggtcagcatcgctaagagtatcgcccaggccttgagggagtga

SEQ ID NO: 9318 - DNA, 291 bp, synthetic construct
  source 1..291: mol_type = other DNA
atggacaaggagaccatcaaaaaggagctggccgacaaaagcaacgaactcctggccaaatatggcgagcaggatctagtagaggatatatcagttatgaatatggcgacgaagacagtgtttctcggatctcttagggtctacaactacgacaatgcaggcaagatcaagaacgatctggaaaagaagattaaaaactatggggaaattgccatccgggacgagaagatcgtgccatgctgtgctcccagttacatccacgtctccttcaacgtgagcattaataaatga

SEQ ID NO: 9319 - DNA, 1965 bp, synthetic construct
  source 1..1965: mol_type = other DNA
atgaaagaatttaagttaaactcaccttataaaccattaggtgaccaacccaaggccatcaacagcctagccgaaggtatcaaaaaaggcatcaaggagcagacgcttctgggcgtcaccggttcggggaagacttttactatggctaatgtcattgaaaaggtgcagaagcccactcttgtgatctcccacaacaaaactctcgctgcccagctgtacgaggaatttaaagaatttttcccagacaacgccgtggaatactttgtgagttattatgattattatcagcctgaagcatacgtgccaagaaccgacaccttcatcgataaggaggcttctattaatgacgacattgacataatgcgacactcggcaacacagagcttgttgagcagggacgatgtcatcgttgttagcagtgtgagttgtatttacggtattggcagccctgaagattatggggagtttgcctttggaatatccgtgggcgatatttacgacaggagcgagatcctggcccggctggtcttcatgcagtacgagcgcaacgacattgaatttgccagagggcaattcagagtgaggggcgacgttattgagatcaatcctgtgcatggaaccccgccaatacgaatcgaactattcggggacgagatagatgcaatcagtatcattgataaggtgacaggtaagaagcaggagtcgcttaaaagatacatgatcttccccgccaagcatttcgtggttggccaagacaagatggacgaggccctcagcaaaattacaagtgaactggatgagagactcagcgaactgaatgccatggggaagctgctggaagcccaaaggcttgagcagcgcacccggtttgacatagagatgctaaaagagatgggatactgccccggaattgagaactattccatgcacctgtccggacggcactggggagataagccctacagcctgctgaaatacttccccgacgatttcttgacaatcatcgacgagtcccacgtgaccgtaccccagatcagaggaatgtacaacggggaccgcgcacgtaaggaaaccttggtggattacggcttccgcctcccgtctgctaaggagaaccggcccctgcgcttcgatgagttcgagtcatccgtgaatcaggtcatctacgtaagcgcaacacctgccgcctatgagctgtcaaagtcccggaatgtggttgagcagatcatcaggccaaccggactcgtcgatcctgaggtgatcatcagacccgtgagcggccaggttgaagatctgctgaaagaagtgaaggccacggctgagaagaacgagcgcatcttagtgaccaccttgaccaagaggatggcggaggacttgacggactattacgcccggatagggatcaaggtacgctacatgcattctgagattgacacactggagcgcattgaaattgtcgatgatctccgccggggcaaattcgatgtactggtgggcgtcaacctcctcagggaagggctcgacctgccggaggtctccctggtcgccattctggacgctgacaaggaggggtttctgagaaatgagacttcactgatccagactatcggccgggcagcacgaaacgttaacggccgtgtgataatgtacgcggacgaaatgaccgatagcgtgcgaaatgcgtacgacatcacccttaaaaggcgtaaactacagatgaaatacaatgaagtccacggaatcactccaacatcaacgcagaggacactcaaggagaaactggctgaggaggacgaacggtataaaattgcgggcgctaacattgagaagatgccgaaagacgagcttcgactgctcatcaaggacatagaaaaggatatgaaggatgcggccgcacgccttgacttcgaacgggctgccgatctcagaaacaaactgtatgctttgaagggtatggacaagtga

SEQ ID NO: 9320 - DNA, 2889 bp, synthetic construct
  source 1..2889: mol_type = other DNA
atgaccgaggatagcaagaaacagatcatcatccgaggcgcacgggagcacaatttacaggacattgatgtttgcgtcccccgggatgaatttattgtaatcacaggcctgagcggatcagggaagtcgtcactggctttcgatacaatctacgcggagggccagcgtcggtatgtggagagcctgagcgcgtacgcaagacagttcctggggcaaatgaaaaagcccgagatggaatccattgagggattgtcgccggctatttcaatcgatcagaagaccacacgcgaaaacccccgatccaccgtgggcacaattactgaaatttatgactacctacgtctcttgtttgccagggtcggaatccctcactgccccaattgtggaaaagagatatcacaacaaactcttggacagataggcgactccatcatcgaggaaggggaaggtctgaaaatccagatcctagcacctatcgtccgcgacaagaaaggccagcacaaggacgtcttcgaggacctgcgcaacaaggggtttgtcagagtccgggttgatggggagataagggagctggaggaagacatcggcctcgccaagacataccggcacagtatcgatgttgtggttgacagactgaaaacccgccgggatgtcgattttaaaaggaggctcgttgattctctggaaacagcatccgagttctcggagggtttgattaccgtactgttcaccaaggacgacgaggattatgagaagaaatactccgaacatttcgcatgtgtggactgcggaataaacttcgaggagctgactccaaggatgttcagctttaacgctcctcagggagcctgtccagaatgtaacggcattggcagcaagatggagatcgacccggacctgatcgtgcctgacaagaccctaacactcagtgaaggcgccattgcgccgtggtcaaagtcgtcaacaaaggagaattattactaccagatgctcgaggcagtatccgagtattttaatttcagtatggacattccctttaatgagctcgataaggaataccaaaacacaatcctttatggctgtaacgataagatcccgttcacttttaaacgaagaaacaaatcttacatggtgaaccgtaaatttgagggtgtcatcccacgcatggaaaggctctacgtggaaacgaagtccaactactcccgcaaatacctcagcaagttcatgtctgaccggaaatgccatgtgtgcggaggcaagcgactccgcccagaggtcttggcagtgaccgtgggcggaaaatccatcatcgacgtgtgcgatatggccatcaaggactcatatcagttcttccaggacctcaaactgacggagagagagaacttcatagcaaaggaagtgctgaaggagattaaagaacggctgagcttcttggtggaagtcggactggactatctgtccatgagcagatcctccgggaccctgtctgggggagaggctcagaggattcgcctggccactcagatcggcagcggactggtgggagtcctctacatattggacgaaccaagtatcgggcttcaccaacgtgacaacataaagcttatcgacgcccttaaacgactgaaggacctgggaaatacgcttgtggtagtggagcatgatgaagaaacaatcctgtctgctgattatgtggtagacatcggcccgggcgctggtgagcacgggggcaaggttgtggcccagggaacccccctggacatcatgaacaatccagattccattactggccagtacataagccgggtgaagaaaatagaaattcctaaacagagacgacctggaaacggcaatttcataaggattgtgggtgctgcccaaaacaaccttaaagacattgatgtggatatccccctcggtaagttcacttgtgtcaccggggttagtgggtctgggaagagtagtctgattaatgagatattatacaagggggttcaaggcaagctcgccaagaagttcacgttcgccgggaaatacaaggaaattgaaggcctggaaaacatcgataaggtgattgccatagaccagaaaccaatcggacgcaccccacggagcaatcccgccacgtatacgggagtgtttactgacattcgggagttatttgcaaacacccccgaaagcaaggctcgggggtacaaacctggacgcttctcttttaacgtcaaggggggaaggtgcgaagcctgcagcggtgacgggatcgtgcagattgagatgcactttctggcggatgtttatgtgccctgtgaggtctgcggggggaaaagatacaatgaggaaacgctggacatcaggtataagggtaagaatatctatgaggttctggagatgaccgtcgaagaagcactagagttctttgagaacatcccaaagattacgaaaaaactgcagactttatacgatgtgggattaggttacatgaagatcggtcagcccgctacaacactgagcggcggcgaggcccagagaattaagctcgctaaggagctgtctcgcacaagcaccggcaagactctctacatcctcgacgagcctaccaccggcctccatttcgccgatattgaaaggttgcttgacgtgctggccagattgaccgatgcgggcaatagtgtggtggtgatcgagcacaatctggacgtcatcaaaacagcggaccatattatcgatctgggtcccgagggcggtgacggcgggggccaggtgatcgctactggcacccccgaggacattgccaaagccggcacttataccggggaatttttggagaagatgcttaatgagaacattaccccttacgccaaggaactagtagaggatatcggtaaatga

SEQ ID NO: 9321 - DNA, 1209 bp, synthetic construct
  source 1..1209: mol_type = other DNA
atggtgctgagtacaggaaacactgcctggatgctgatcgccacgattatggtgttactgatgagtgttcccgggattgccttcttctatggtgggttatcaaagagaaagaacgtcctgaactcaatgttcctctctttaatagcattcgcaattgtgagtatcctttgggtgatgtacgggtatcaatttgcctttgcagacctcagttttgcggggctgatcggaatcccaaaaacattgttcatggaaggaattggggtaggttctctgaccggcactattccaaccttcgtcttcgccggatttcagctaacatttgccggactgaccgctgccgtggtatcgggcgcaatcgtgggacgcatgaagacaaaagcctgggtcatatttatcatactctgggccacctttgtctacatccccatctgccactggatctgggggggcggctggctcatgaacattggcgccatcgatttcgccgggggggttgccgtggaagtgaacagcggcttctccgctctggctctagctctgatccttggaaagcgaaaggatacgtccttgctgccacataacctgggctactccatcctaggtgcgggattcctctggttcggctggatgggattcaacggcggcagcgctctggccgctaatggcctggcagggtccgcgattctggtgtccaataccgctgctgctgtggccatgattgtatggttgcttctggacgtgctcaatgacggcaagccgacagtcctgggtgcaatcactggtgccgtggccggcctggtggccgtcacgcctgctgcggggtttgtttccctcagcggcgggattataattggacttggcgcgtcgttgatttcatactacgcagtgttttatatcaaaagcaaattcggttacgacgatgcattggatgtatttggtgtgcacggactttctggggtctggggcctgatcgccaccgggctgttcgccgcacccagcatcaatggtgtggcggggctcttctacggcaatcctgagcagttgatcatccagctgatagcagttgttgccgctatctcatatagctttaccgtcagctatttcattggaaaggtgctcgatatccttattggcctgagggtcgacgacaaagaggaaataatgggactcgactctgccctgcacgaggagagcggctaccggatctga

SEQ ID NO: 9322 - DNA, 339 bp, synthetic construct
  source 1..339: mol_type = other DNA
atgaagcgcatcatcgcggtaatacgtgaagagatgtttgaccccgtgaagctggccctcttggccgccggatgtgaggggatgaacgtcagcaccgtgaagggccggggcagacagactggaattaaggagtcttaccgcggttccagctattgcattgacctgattccaaaaacacgggtcgagctaatcgtgaacgaggaggacctcgataggattattaacatcatcctggaaaatgctcgaaccggggatatcggcgacggaaaaatattcgtgtcagacgtggaggaagtcatcaggatcagaacgggggaacggggcagtgatgcagtttga

SEQ ID NO: 9323 - DNA, 1500 bp, synthetic construct
  source 1..1500: mol_type = other DNA
atgaaggaactgtatgagaagatgattgacgaggccatggcggctcagaaggctgacgtctcggttgtatcaaaaaacaggtataatgactttaaaatagtggatgcaaagccatatgccgatgctgtgagcaacatgaaagccctggacaaccaggccgagtctgtgatcaacttgcataaagaaagcgtgaagaaccattacgagatcttgagctccatcacaaagaccctcaagtgcgaggatgatcccttcattgagcacttccagacccctccggtgtttgagatcctctgtgacgaggacggggactttgccgatagtgtggacaaattcgttcaggcaatcgccgatgcggaagcactgattgccaaggagtccatcaggcgctatggcggattttacggccctacatgcgtggttgacttcgccttaatgccgggcagtaccagtaatgtggtcaaccagatactgaaaacagtcgatatcccagttcaccacaagcaggccatcctgtctgctaagagttggggtatgaacacttcttacggcatcggcgatgcttttgcgcatgcaattgaagatgggttaaccgccgcccaggctacggaaaaagagatcgagaccctgcaaatgatctacaagactcctattgagggccaggggactttgatggacaacgcaaatcattcatcatttgacgtgcgcgatcacatgaataagtacaaaaaggcaatgaccaaatcggtgaaggctgcaatggacgatggggtccactacggcaacattgtaacggtgccagcttactgcgtgggggacataggacaccacatcggtcagtccacctacaatatgtgtaaggacgacgtgataatggctattatagaggccacgacaggggttatcgaaaacagcctccgcaacaacatcgacaagttcaaaactccatttgacgtcctgaaacttagcaccggcgcgccggcctgcgccacagaatttctactcgaactggatggattcaccgctcccatgatcgtggacctgctgaataagcgtttccacaactatgtccagcaatatcctacccgaggcgcagccgctgagctgcacaattgcgacttcatggacatgatctaccggggattcaacgccatgagcaatgcccggaagatgagatcctccgcaggattcgagattatcccccggattaagggtatggaaattgatttcacacccatcctcgaaaatgaggtgctgatgaaccctcagagatacacatatcccgcctgtgctatttctgtcaggttctcatccctcatgcggctggccgattacccatgtcttctaactagcgagcccatcaccgcaaccatgatgacaaatattatagcccttgacaagaaaacgcccggtagccccgtaagaggatgtaaacaatgcgcctccgcctgcctcgcggataacactcatgaatactgccagtggcgagaggcggtctga

SEQ ID NO: 9324 - DNA, 774 bp, synthetic construct
  source 1..774: mol_type = other DNA
atgccctgtaatatacgcaaaaaattcttcgccgagctactcggcacctttttcctggtctttttcgggacgggatcagcagtggtcaccctgctggtgtcgcagagtatcaatcccgctaatgtcggcattggagtgctcggagggctgggtgactggattgcaatcgccctagccttcgggctcactgtcatgatcggcatctacgcctttgggaggatatctggggcccacttcaacccagccgtcactatcggcctgcttgtcacgaagaacattcctctggtggatagtatctattacattgttgcacagttgattggcgcctgcctgggcagcctcgccttattcctgtgtcttggggcgcaggctgttacaatcggaggactgggcgccacagcccccggtctgggtatcggctatatgcaagctatgtttgctgagtttatcggaacatttttcttaatgatggtgattatgggtgtggctgtggataagaaggcggaacctgggtttgcaggagtatccattggcatgaccgtgactgctgtgatcgtagtgttgggcagcttcaccggggcctccatcaaccccgcacggaccttcggcccgtacttgatggacatgatcctgggcgggcagaacctgtggggcttcttcccaatatacctcgtgggacctatacttggtgctatctgcgcggcatttgcctatgcctacctggcgaagaacagcggagtttgcgaactcccgcagccatttaaagacgagtga

SEQ ID NO: 9325 - DNA, 1782 bp, synthetic construct
  source 1..1782: mol_type = other DNA
atgaacaaggagattatcgcagccgttatggcttctaccatagatatggataacatgtctagtgacagactagaagccctgaccaaaggacatgggatgctgaatatcgctgccatttgctctgcgaacgtcattgccgaggaggtgctgcgaggcgttaatctgcagctgactgacgaaaatatcggagaactaccaatcgacgatcttctgcgcaaatccatcgaggccgccgagaacgccggggcggatgcagcaaacgctgctctcctcagtgcaaccctctgttacttcgctggtagcaacgctcaagccggcgtcccggcaggcaaccggaagctcggtgctatggcacggatgatcgctggggtggaccggtgcggagtactggctattccaacaccaaaggcaaacaacagaatttcaggatatgctgctgtgaaggccgtgtacgatgaggtgtttaataatagcctgacgcccatcgacggctccatcttgcccttgggcgtgggcggaggcccattgtacggacacaacgccctcggggaggatatcgggttctcccagctggccatcaacggtgctaaagcaggtactaaggggatgttgcaggcattcgcgaatgtgggaatgcctcccagcccgattattgccgcaattcttggtgttgccgcaatattagaaatcgtccaccccgacagcgaggtggcggaggaatatggggaatttttcgtagccaactcggcctacgtcgccgggctgggcgcctgtgaggtggccggcctgcccgagaagctgcatatcagggggaccggcgaggagtatgacaccgctaacctcgtcggggaccttggcgtcattatgaaggatatcggcggaccctccgtggtcggcatgattgcatttgaggaaatgctttcggcgtttgaagagagcttggacattggtgcaggattttcaggcggccccctgcagccacctctcggccacatgacagctgacgcgattctcgcccttaaggttttactgagcaccaatggcgacattgaccaggctgctgagaagatcaaagagatcaagactaatttctggctggagcctgagatagcaaaaatagctacaaacaccatcgctcgtaaatcagagcaagtcaggcgcggacccgtgacacgggccatgatcctcgccacggaaggcgccctgacgaaggagaccctgcgaattgctgagttcacacaggaaaagatcactgaaggaatggatctgagcgacatcaccaaagcactagacgacgaaaagctgaacaatgtgtgcaaggcggccagcagtctcttcagtggaatgatggataaggacatcaagatcatgatcactaagtacgccggccgctcccgcaggaaagaaaatccattcctggataattacgccgggtttgataccaacgtcgacgtggagatagagatcgaaggggaaaaaatagtgatggaaaagcttgccaacgaaatcattcctgatgcggtggtcaacaagaaacaggacgtattggaggtgttacctctggcctccgtgcctgtgaccgaactgcagctgtgcggacacacaatcgtgaatgtaatcgtgccggccgccgttgccggggcaatgggtgttgatgagtccgaggtcatcgctaaaaaggccacaaagggggcctatataacgtcaagcattcccggtggcattgagagggccagagacgtggcgaaaagagcggccaatataatgaaagatctcaactga

SEQ ID NO: 9326 - DNA, 849 bp, synthetic construct
  source 1..849: mol_type = other DNA
gtgtttctgatattcgttcgcggagtgctgatgggcagcgctgatatcgtccccggggttagcggcggcacaattgccctcatcaccggaatctacggccatctcgtcgaggcaattagcaacatcagattcggtttcctgaaacccctgttcaagggggattttgacggattcgtaaatagtatcctcgacgaaatcgactttaagttcctgatacctctcatcctgggcatcggggtggcctttttgaccctggccaaggtcgtgacttactgtatggacgtctatactgccttcacctacgcattctttttgggtctgatcatagcgtccgcggttattctcttcaaaaagctcaatcacattaactttaaaaacatcttattcgctcttatagggtgcattttgacatttatatttgtgagcctcaaccccatcgccaccaatcattccttactggtccttttcatctccggaatgatcgccatctgcgccatgatcttgccgggcatctcagggagcttccttctgctgctactgggccagtacaagtacatgctgaatgccctgcacaattttcacctttcagagatcatcgtgttcgtagtgggggcactaattggcattctgggattcagcaagatcctgaactatctgctcaaaaaccacgaggagatcacaatggcttttcttattggcgtgatgatcggatcgctacgggtgccatgtgtagaaattgctaacagcatttccataaacatcgctagtttgttcccatgcctgattgtggccgtgatcggtttcgcaataattattgtcctcgaaacgaggtttgactatattgattga

SEQ ID NO: 9327 - DNA, 2577 bp, synthetic construct
  source 1..2577: mol_type = other DNA
atgatcaaaaagcagtggcgcctgtacccgattgggtcaccaaaaggcgccctgaaccgtaagcgggagcccgatttcgtggggaacataaaattctcacggaatggggacgttctaagcatcagccgctttgtggccgattacaatttcaacgataactccaccctgaatgaaaagctcatgcccccgggggaagtaatcaagctgctacgcagtcaggccgtgtttctcgctactcctgatgatgacgtggagaagtttctccgctccctgaatatcaaagttcgcaaaactcaggtctgtgacttctgtgcctatgagggggatattacaattgtcaactcttcctactcgtacaagtaccacaaccagctgatctgtaggaactgcgcattcgacacgataaaacaagagatcaaacttcaaggtttcgacaagaagatttttcggaatcttaaaagcacgctggaaaaaacaggaaacctggagaagacactcagcgtccttgaccctcactttgatcccctggggaatactaatctaaccttatttgataagacaaagaaaagcaagcatatcataccgccagtggacatgaaaaggctgaaaattcctaagaacttcaagaaagtccttctggagtcgggaaataccaagctgctgccggtgcagtatctcgccatcaaggagggcctgctgaagggcgaggatctcctggtggtcagtgcaaccggttccggcaagaccctcgtgggtgaactgtcaggcattaccaaggcactcaaaggtaagaaattcatcttcctcactcctctggttgcgcttgctaaccagaagtacagggacttcaaaaagaagtacagcaaactaggcctgaaagtatccattaaagtgggccgtaacagagtgaaggcgaagggagagctgaacctgccagattcagatgtctcctccagcgatatcgtggttgctacatatgaaggaatcgattatttgctccgaaatggcaattcgcaggcgttatctaatttgggtgtggtgcttatagacgagatccacatgattgatgatgaggataggggcactcgcttgaacggactcatcaagcggctgaaaaacctctatcctaagacgcagattatcggcctgtctgctaccgtgaagaaccccgaatttttggcttccgagtttaacatgaagttagttcaatactcgcagaggccagtgcctttggaacgacatctcgtttataccagaaacgagagccagaagcggcacttgatgcgaaagctggtgcagaaggagcataacactaagtctaagaaagggtatagtggacaaactatcatatttacaaattccagaaggaagacccaccagatcgccaactatctgaacaacaagcgggtgaatgcccaggcctaccatgcaggcttgagctactacaaaaaagagataatcgagaaagacttcgataaggggaagataagctgtgtggtaacaacggccgctctggctgccggtgttgatttccccgcctcacaggtcatattcgactcacttgtcatgggaaacaaatggattaacccaaacgagttctcccagatgctcgggcgggctggccgaccatcttaccacgaccgtggcgtggtgtatctgatgcccgaagtaggcaacgacttcgccggagaatccgaggaggccaaggcgctggacctgctcgaaagcaacagtgaggacgtctacatagagtacgacgaagagtcctcttacgaacagatcctcgctgacattagttccaatagcattaaatctcgcaatgaactgaacgatttctatgagaatatcgacgtgcccatttcccttaagacagccacggacgaaatggaagatctgggacttatccgctatgccagcagcaacaagtttgagattaccaaatacggcagagcaacttcagtgtcattcctgtcagtcgacgaggcagagtttattaaaaacacactgaacaataaggaatacctcaatcggtacgttgctcattctcccatgtataagaaaaagaagaaatacgacaagctaaaagtgctggtgctggcgatggcattggacctggaaatgtttgaaaatgcctacttatcgagtgtcattcacaatcagatcgcaaacgccctgaagatcaagtttagcaccagacttttcgcagaaagcaccctagacatcatctctagtggggaagctattgagaaagtggacaaaaagttccaggacgccttgattgcgctgcaaagtgatttcatgcaatgcaagtgccaggacaggccattctgcacctgcatgcagaagggaatcagcgaggtcatcattcacgagaggctcaagggcaaagacccccaggatatcagcaacaagttatttcggaaataccagatccaagtatatcctggagacatctttagctggctggacaattttgtgaagaacttggacgccattaaaagaatcgccaagtccttcaatagaagtaacgtagtcaaaaagaccagttatctcatcaagaagatcgagaatgggtga

SEQ ID NO: 9328 - DNA, 420 bp, synthetic construct
  source 1..420: mol_type = other DNA
atgaaggggtgctactgcctaataattaatgtggattctaagaagacaatcaaaatcggcaagttgggcaagatccagttcgagaaagggtattacatttacgtgggtagcgccatgaatagcctcatggcacggatcaagcgccacctgagtgacgaaaagaagcttcactggcacattgattacctgctgaaaaatgccgagatcaccgatgtaatttacaactcctcaacaaaaaaggtcgaatgtgaactgtccgagttcatcggatcgaagaccactggaattacggacttcggctgcaccgactgtgattgcaaaagccatctgtattactttaaaaacaggaacaaagcgatccattgtgtgctcaacgcttatgacagcatagacatcccctgcgagtttttcaaggagtga

SEQ ID NO: 9329 - DNA, 414 bp, synthetic construct
  source 1..414: mol_type = other DNA
atgattttcaagctccagaccaagggccacaagaacgtcaccagcctacataaatcgactttcgagataaccgaggatgtcgaaattgggctggccgcggattgtatcattggcaccagtatggacaaatccatgagcgactttccagaggagtttaaggataagatcgccaattcaaacacaaaaatcaccgtgatcctggatacggagaatggacacgacgagatcgtggggttcggtcatgaaaacttgacccttactcaccccacagacatggtaagcaggactagcgattacacgtgctcccgcacactgatgattaaggcaaacaaggctgcccgggacctggacgacaatctgatcgaagacctcaagaacgaaaaaatcatggatgtgacaataaaactcgagtga

SEQ ID NO: 9330 - DNA, 852 bp, synthetic construct
  source 1..852: mol_type = other DNA
atgaaggctgtaatcccggcagccggcttcggaactcggttcctccctgctactaaggcccaacctaaagagatgttgcccgtattcgataaaccgactatccagtacgtgatcgaggaagcagtcgcctccggcatcgatgacattctgattgtcacgggtcgcaacaaacgcagcatcgaagaccacttcgacaagtcatttgagctcgaacaaaccctgcagagtgcgggtaaagacgatcgcctaaagcaggttcgtgccattacggatttggccgatatctgttatgtgaggcagaaggagcagaagggtctgggcgacgccatttactgcgccaaaaagcacgtcggagacgaggcttttgccgtcatgcttggggatagcatcacaaaagggccaaccccatgcaccaaacagctgatcgacgtgtacaggaagtacggggcgtccgcaataagtctggaagcagtgccaagagaaaaggtggagcgatatggaataatcaagggggaggaggttgagaagggcatctacaacatttcgaagctggtggagaaaccccttgctcatcaggcaccctcaaacctcgccatcatggggcggtacgtcctcacacctgatatttttgacagaatagacgaaaccgagcccggcgtgggcggcgaaatccaactgacagacgccctgcagaagctcgatgcgatttatggggtgattttcgatggaaagacctatgacattggcaatcggctggagtggttaaagacaagcatagaatttgctctagacgattccgagagcaaagacatcctgatcgaatacatgaaagagatgatcgacggagtgtga

SEQ ID NO: 9331 - DNA, 1266 bp, synthetic construct
  source 1..1266: mol_type = other DNA
atgcagtaccggctgatcaagaagacaggggacgaaattagctcaatcggcttcggcgccatgcggctacccttgaagaacggcaagattgatcgcaccgaagcccgtaaactcatttttcacgcaatcgacaacggcatcaatttcattgacactgcctacctctacggggacagcgaaacgttcctgggggagatcctcaccgaggacatacgatccaaggtgaagatatgcaccaaactgcccgccatcaacgttaaaaagtatgaggacatggagtcctttctcaacgagcagctgaggcgcctgaatattgactgcatcgattattacctcatccatggggtggacctcaagaacatgaaccgcctgctaaagcgggatctgattaaattcatcgagaaggctaaaagcgatgggaaaatcaagtacataggcttcagctaccatggacctaaagaggagtttcagactgtcgtggactgctatgactgggatgttgtaatggtgcaatacaattacttcgacgagaatgtccaggccagtatagaaggcatcgagtatgcggcgtcaaagaacatgggcatctttgttatggagccactgaagggtggaattttagcagggaatatgcctaaggaagcagagaaagtgttcagaaagagcaacccggacaaaaccaacgccgcctgggctttggagtgggtgctgaataatcgaaacgtaacatgtgttttaagtgggatggatagtttcgagcagcttgatgagaacctggctgtggccaatagaactacacccatgtcgatgacatttgaagatttggaaacggtggaactggtgaaaagggtaatgagaaactccctcaagatcaattgctctacctgtggatactgcatgccctgtccacagggtgtcaacatcccggaatgtatgaaaatatataatgagaaatatctattcaaccacaaaggaattgctaatctgtataatgacgtctacctcttcaacccaaagggccttattaatcagtccttcattgattattaccaatacgtcggtggaattatgggaaactctggaaacgcaggtaaatgcaacgcctgtggcaagtgcctgaggaaatgcccccagaagctggacatcatcgctgagctggagaaggtgaagaaggaatttgaatttcctggcgtcaagtacatgttgctgtttgtgaagcacgtgggcttcccactttataaatttatcaacaagcttctgaactga

SEQ ID NO: 9332 - DNA, 210 bp, synthetic construct
  source 1..210: mol_type = other DNA
atgaaactcgaggaactgctggcaccatgccccaagtgtggcagcaaagacaaaattgcccaccggaagatgctcgataatcatagggctcacgccgagatggacaccgtcaagtgcgaagagtgcgggtatatctttttcgtgaacgagaacatggaggaagacgagaaaaagcagctactgaatgaacttaacaagatctacggatga

SEQ ID NO: 9333 - DNA, 1113 bp, synthetic construct
  source 1..1113: mol_type = other DNA
atgattattcccactctcaactgcccctccaagtgcaaatattgttggggctctgagaataaaaaagaaatgatggatattggcatcatagatcagattataacttggcttagcgacttcagagacgataaggtgcactttaccttccatggcggtgaaccgctgctcgcaggctacgacttctacaagaccgctttggagaagctgtcgctattgcctaacctagatggattttcgctgcagagcaatatttggctgctgacggacgagcttatcgacctcttcgtcgagtacaacgtggtagtatccacaagtattgacggaccaaaggagatcaacgactaccaaagaggggaggggtactttgataagacaatggccaggtacgaagctgctaagaacaaaggactcttaattaactttgtgctcacagtgactgattactccaaggacttcagcgacgaactgtacgatttcttcaaaaatgagaagatgaatcttaagatccacgccgccctgccctcactccgcggcgacaacgccgactcctgggcccttgagcaagaagagcacgggaagctcctggtcgagtggttggataagtacctgtatgacctggacaaattctccatcatggatctcgaccatatcagcaaaagttcactgcggcgcaggggcacgctgtgcacctttgcagactgtatcggaaccaccttcgcggtcgggttcgatggctctatctatccatgctaccgctttgtgggaatgccggactacatcttagggaacgtcggtgacaatccaagtttcgatgacctgaagacaagcgatgcctgggtgaagctgcaggagtttcgggattatgtggatgaaaactgcaagaaatgcaagcacgttaaatattgtgagggaggctgcccttacaatgccatcgtggcatatcagacccccaaagccgttgacccccagtgtcgggcatataagatgatattcgacgaagtgtcaaaacgaatgaacaaggagttcgctcgttctgcgtttgggctgggtggcagcgagcctaaaggtgaaggggaagcctttagcatcatggacttggctatgaagcactga

SEQ ID NO: 9334 - DNA, 2049 bp, synthetic construct
  source 1..2049: mol_type = other DNA
atgatcgatgagatcacggatttcctatttggacttaagatgaccattgtgtcagggatatttttactgattgccgtgatcttcatgatctttggagtgaatacgccgatctatttaaaccctgcctggggaaccgtgataataagcgggattccaatgctaacactggccatgagcagacttatcagggagaagtggatcagctcggccctgctgatcgctatcgctatggtggccagcctgttgatcggtgaagttttcgccgcaggcgaagtggcctggatcatggccctcggtgctatcttggaggactggacagtggaaagagctaagaaaggactgaagaatctgattaatctcaccccccgaaccggtaggagaataatcaacggtaacgaggagatgatctttgtcaatgaaatcaaaattggggacatcctgcgaattttgccaggggagagtgtccctgttgacggcgagatcgtcagggggacatcttcgctggatcagtcaattatgactggagaatctctccctattgacaaagaggtgggcgatgaggtgttttgcggaaccatgaacatgtatggcgcaatagacatcaaggccactagtttggatgagaactcatccctgcagaaactgatcgacctcgttaaagcagcggatgagaagcaggctccaacacaacgcatcgcggacaagtgggccacttggctcgtgcctgtggccctcatcattgctgtggtctcctggatcgtcacgggcaacatcgagcgtggcgtaacagttttggtagtgttctgcccatgtgcactcatactggctacacccacggccataatggctgcgattgggcaggcaaccaaatatggggtcctgatcaagagcggcgaagcactcgagaccctgggcggcctcaatacgctggtcttcgacaagactggcaccctgacctacggtaaccttgaagtttctgacgtgatctcccttaacgagcacctcactgatgaggatttgctaaagatcaccgccagctgtgaaaaattaagcgagcacccattggccaaggccatcgtaaataacgcaaacgaagttaagattcaaattgaagagcccgaggagtttaagatgtaccccgggaagggagtgacatgtatcaactcctacggtcgcgtttatgtaggaaactccaaattcctatccgaaaacaacattcatataaacattgacagtcagctggacaagctcaaacatgagggcaaggcctccatcataattgcactgaacggcgaggtcatcggccttatcggcctttctgatgttgtgcgcgaagactccaaaagcatgattgacaaactccacgacctggggaacgagactatattgctgaccggggataacacagaaaccgccaattacttcgcggccaaggtgggaattagccgggtgtacggaaacctgctgccgcacgagaagctggaccggattgaaaagctcaaaaatgatggcaagaatgtctgcatgatcggcgatggcgtcaatgatgcccccgctctgaaaaccagcgacgtgggtgtggctatggggtcagtgggaagtgacgtcgctatcgaagccgccgatattgctctgctgggcgacgatatcgggaaaattccctacctcaagaaactgtccaattcgacgctattcacaattaaggccaacattgcaatttccatgacaatcaatgccgtcgcgattgtctgctctgtccttggcctgctgaatcctgtaaccggtgcgatcgtgcacaacgccggaagctgtctggtggtgcttaacgcagcactcttatatgacaggcactttgatgactcagtgaaaataatggatactgagagtgtggagcactctcattaccacttccacaacgacggggagcacacccatagccacgaccacgtgcatataattaatgaaatccgcaccgacaatggaatcaagcatatccatgctcacaagcatgcgttccggcggcagatctgcaagacttaccacagttga

SEQ ID NO: 9335 - DNA, 903 bp, synthetic construct
  source 1..903: mol_type = other DNA
atgctgacaagcgtgcaaaaggaaattctgcaaaccctcataaacttatatcagtccagcaatgggaagtctatcaagggagaggacatcgctgaggtgatggggaggaatcccggcaccattcgtaatcagatgcagtcactgcggagcctggggctagttaagggggtacccggtcctagaggcggatacaagccaaccattgaagcttaccactcgctcaacataacagtttcagataaagactccaaagtgcctattttcaagaacggcaacagggtggaggatatttctgtggcaaagattgagtttacgagcgtgccacagcccagtgagtgtgaagccgccatcaaggtacttggaagtatcaaggaccttactctgggcgataccatatccatcggcccgacgcctgtcaacaacctgggcatccttggaaccatcgttggccgggacgatatggacaatatcctgctcctcgacacgaagactatccgaagtattcccaaacagtcagtgggtgagattgcgagccgggatgtcatatcctttaaaatgaattgcactatcaaggacgccgccaaacgcctcgctgaaaacgagattgacggtgctccggtcatgaaggatggaaaggtcgtcggggtattcacagtgtctgacctggtccatgcgattgccgaggacaaagataactgcactgtgggggaattgatgagcaccaatctcataatcgtgaatgaggatttgaaaatcgccaacgcaatcgaagtgatgctgaaaaaatcgatctcccgcctgatcgttgcagacaacaaccaggatctgctaggcatcgtgaccagaacagacttgatcaatataattgccaacctggaccagttcccaatcatcacaaactga

SEQ ID NO: 9336 - DNA, 924 bp, synthetic construct
  source 1..924: mol_type = other DNA
atgaaggttaaccagatcaatgtcgaatccaacatgaatgtgagcgatctgatcgacaactttgacgcctccggtgtgttgggggctggccgagtagcgcgggcccgcaatattcttgtggacatgatacaggataaggacatgaatgtgtttatgagtctgggcggtcccctgatacctggcggcatgagaaacgttgtctcgaaaatgatcaaagaggggcacgtgaatctgatcgtcagctccggagctaacctcactcacgacctggtcgaggccttcggcggcgcacattaccgccacgagggaaaggatgacgaggaactaaacgaagaagggatcggtaggattgctgatattaatgtgggtagcgacgatttcaccatttttgagacagagatcaccaaaatattcgaaaaaatagcctccaagaggaaggtgatcagcatccaagagttactgtatgaaattgggcttctcgtggaggatgaaaactcattcattgcaaacgctgcaaagaacaatgtcccaatcttcgcgccgggaatcattgactcaatgatcggcttgcagctctggattttttcccaggaccacgactttacaataagtgccgccggagatatgccttatctaagcgatattgtattcgggtcggagaaagttggtgccatcctcttggggggcggcctcaccaagcattacaccctggccagcaacgtaatcactggaggactggactcagctattcagatcacaatggatcggcccgaggcaggcagtctggggggcgcgccactcgaggaggccaagtcctgggccaaagccaagtgcggatctaacctggctagcgtggtgggggacgtcacggtgatcttcccccttatctacgcaagcgcactggacaagatcaatagtgactga

SEQ ID NO: 9337 - DNA, 480 bp, synthetic construct
  source 1..480: mol_type = other DNA
atgaaatacagcgacgatctgttcgacgacaagaaggatctgaagttcgcctccgtgttcggggttctctgcgctatcgcatcggccggtgcgaccatctatagtacagaggccgcatacatttttattgccatcctgctaggcaacctgatagccctcaaagtcgacggcattcaccatattataacgttgcttttgtttgttctgttatgtctcgtgttcgggattcccgagctgagctacgtcattctgctcatctgcatcctggccgctcttggagacgaagtcgggcacgagctgatctcaaaggtgaccgataacaagtttctgaatctcttcttcgaataccggtttgtaatgaaagtggtgatcctccttttggcgatcggcggcgtgttcagcatttggatattcctatgctttctgtccttcgaaatcgcttatgagttcgcaggaatcatctttgagaggtttaactga

SEQ ID NO: 9338 - DNA, 246 bp, synthetic construct
  source 1..246: mol_type = other DNA
atggccaacgaggtcaccaagctggtcatggagaccatcctgggcctaattaccactgccttcgcattcgtcgccgggctggcttggaatgatgccatccagaagttgattgcgacaatcataggaacgggagacgcgcttcccagcctctttatctacgctatcatcgtgactattgttgccgtggtggtgacagtgctgctggctcgggtagcagggaaaatgggcatagaactcggcgaatga

SEQ ID NO: 9339 - DNA, 648 bp, synthetic construct
  source 1..648: mol_type = other DNA
atgaacataaagaacaacctgatcctagcccttgatgtcatgaacgaaagtgatgctattgagatttgcgattcaattaaggaatacatcgacacaatcaagatcggttaccctcttgccttggccgaagggctcgagattatcaataagctgaaaaataagttcggctttaaagtgatatgcgacttcaaggtagcggacatcgacgcaacaaactccaagatctgtgacgagacctttaaggcgggggccgatgcaataatctgccatggcttcgtgggcgaggacagcgtccaagcctgtctgaatatggcaaacaaacacggcaaagagttgtttctcctgacggagatgtcacaccccggggctaaaatgttcctgcagaagaatgccgatgcgatagctcagatgggcgtggatatgggaatcaccaactatgtggcccccgcaactaggctcgacagactgtccgagatccgcaacattgtgggaaatgagagctacattatttcgccgggcgtcggaaagcagggtggagacgggaagaaaactctcgaatactccaatgccatcatcgttgggcggagcatttatgaaagtgaaaagccaaaaaccgcttgcaaaaacctgatcgagagcttaaagtga

SEQ ID NO: 9340 - DNA, 666 bp, synthetic construct
  source 1..666: mol_type = other DNA
atgcatatcatggagggatatctcccactaacatggtgcatcgtgtggtttgtcatctcattcatcattgtggcctttgggatttatcagatcaagaagatcgtggacgaaacccccgagagcaaggcgctgctcgctgtgagcggcgccttcatgttcatcctcagctcattgaaactgccctccgtgactggcagttgctcccacccttgtggcaatggactgggcgccgccctgtttgggcccgcagtgacggctgttttagctaccattgttcttttgttccaagcaatcctccttgctcacggcggcctgacgacactgggggccaacatattttccatggggattgtcggccctttcgtcgcctggattgcatacaaagggctcacaaaggccaacatctctagcaccatcgctatattcttcgccgcatttttgggagacctactgacctacgtagccacttcgttccagctcgcatttgccttcccagcgccgaccttcagtgcagctctgggaaagttcctggtgatttttgccgtgacacaggtcccattagcgatcggtgaggccatactgactgtaatcatttgggatcggctgaaagcgtacaagcctaaactcctgaacaagcttggtgccctggctcccaatgaagcctga

SEQ ID NO: 9341 - DNA, 288 bp, synthetic construct
  source 1..288: mol_type = other DNA
atgaagacctctacactcatcatcctggccgtggtctgcatcatcctgttcgtggcaccactggcaatgtataacggccacggggaggacgatggatactttggcggggcggacgacgctgccggcgaggcgattgaggaatccgggttcgaaccctggttcagctcaatatgggagccgcctagcggcgaaatcgagagtctactcttcgctcttcaggccgctataggtgccatcattattggatacgcctttggctactggcggggtaaaggaaaggaagagtga

SEQ ID NO: 9342 - DNA, 690 bp, synthetic construct
  source 1..690: mol_type = other DNA
atgaagttcgacatggattatatcgcgcacaacaacgcccttacagaaaccaatccttacttcaagttgtttctcacgatcatactcctaattgttaccctggccttcgataacctctacttcgatgtaacggtgtttgtgatcatgagcattgtcatcctgaccatcgccaaaattaactacaaatcatatctgaagtttctcagcattcccatggcttttctggtgatcacatgcatctttctgatcttcttctttggcaaaggagatgtgatctatgagaccggaatactgggcatcgtcgttactaccgactcgtggcactacggcgtgtacacattcatgcgcgtgctgggatgcctgccctgtcttggcttcctcgctctaacgaccccaattgccaagatcttaaattgcctgaggactttgaaggtccccaaaattttgattgagatcgcacttctcatgtataattccattttcatcttcctgaacgaaatcgacaccatgcagaaggcacaagagactcggctggggtatcattcctactggtcctcatttagtagcttgggggccctggtctccataatattccttcgaagcctcgacaaaagtgaaacattacagtacagcctggacagccggggttactctggggagctgccggtgtacgagccaaagaagagatga

SEQ ID NO: 9343 - DNA, 843 bp, synthetic construct
  source 1..843: mol_type = other DNA
atgatcaacatgctggaagtcaagaatattaagtactcgtacaacagcaactatcaggcacttaagggcgtcagcctgaaagtggacaagggcgaaatggtcgctcttctaggtaaaaatggtgccgggaaaagcactttattcctccacctgaatggaatctacaggccggatgaaggaaaagtgttcatcgatggggaagagctgaaatacgacaaaaaatccctgctgaagtttagacaaaaggtcggcattgtattccagaaccctgatgaccagatatttgccccaaccgtcgaggaagatgttgcattcggacccctgaatctcggattgccaatggaagaggtgcaggaccgcgtggaggaggccctcgtgcgggtcggcatgtcagggtatgaaaaaaccgcgcctcaccatcttagtggcggccaaaagaagagggtagctatagcgggcatccttgcaatgaaacccgagatcatggtgctggacgagccaacggccgggctcgacccacagggagtggtggacctgagcaagctgttgcgagagctcaacgacgaaggaatcactattataatctccacacatgatgtggagttagttccgaactatgctcagcgggtattcgtgctcgtggatggtctgctgatcgctgaaggcacccccaaggagatttttgccaagcccgagattctggagaaggccaacctgaaagtgcctatcgttacagaactgtttcagaagctcgaggatgaggggttcgacatggaagggaattaccccctaaccattgacgaggccaaggacaagttcctcaagttgttgcacgagaactga

SEQ ID NO: 9344 - DNA, 459 bp, synthetic construct
  source 1..459: mol_type = other DNA
atgcgcatcggcatatgcgataccacattcgctcggttcgatatggccggcgccgcgatcgatgagctaaagaagaatgcctacgatctcaagataatccgccaaacggtaccaggggtcaaggacctgcctgtgactgccaaaattctcatcgaagaagaaaactgtgacattgtgatggcgctcggcatgcccggccccatgaaaaaggacaagatgtgcgctcacgaagcaagcaccggtttgatcaatgcccagctgatgacaaacaagcatattctggaagtctttgtgcacgaggacgaggaggacaacccggttgagcttgctaaactggcagagaacagggcccgagagcatgcacagaatctgatcaaaatgatgtatcaccggaaagcaatgagaaaggaggctggaatggggatgagggagggaaaggaaaacgccgggccattatga

SEQ ID NO: 9345 - DNA, 708 bp, synthetic construct
  source 1..708: mol_type = other DNA
atgggatttgaagtcacagaggaggacaagaaagccacctatgtcatcctacccgcatacaacgaggccacgcgcatccagccagtgattgaggagattgcggaaaagggctataacatgatcatcgtgaacgacggtagctcagacaacactctggatgtgattaaggagtcccaaaataagtaccctgataagattttcatctacagccacatgatcaatcgaggggtgggcgtagccatgcagaccggctttgacgctgttttacggtataatccaagatacatcgtgaacatggattccgatgggcagcatgacgctgatgacctcgaaaatgtgctggaacccctgataatgggcagggcccaggcagtgatcggggtccggccccttaaggacatgccgctgacccgcaacattgccaacgcaataatgaaccttctcacaaaagtgttctacaaagttgatgtaagtgacagccagacgggtttccgcgctatcaccatcgacgccttgcggaagataaacatcaatgctagaggatatctcatctcgagcgagttcattcgtgaggtcaatgacaacaagatcccattcgaggaagtcgagataagaacaatttacactcctgaaactcgagcgaagggaaccaatgtggcagttgcctttaaaattctgatccaaatgattaaacacaggctgaggtga

SEQ ID NO: 9346 - DNA, 348 bp, synthetic construct
  source 1..348: mol_type = other DNA
atgctgttttactcaattttattccccataatcagcctcattgccattatctggcttctctggaggtacctgaatgagaaagacagcctgatcacggtgattctgtgggcggttttcttgatcatcgtgtccgtctttgccatcttcccacacgccagtaccacatttgctaagctctttggcattactcgggggctggatttcatcatcataattgtgttcgcagtgttggtatataccatcttcaagctgtattacaagatcgacaaacttgaagacaacattaacaaaatagtgaaggaagtcgcactaagcaacgagatctccctgaaagataaggaggactga

SEQ ID NO: 9347 - DNA, 672 bp, synthetic construct
  source 1..672: mol_type = other DNA
atgctgtatttccggggctgcaccgcacgggaaaagctcaataacattcagtctgcaacagagaagttgctgaaactggcggatgtggactatcacatactagatgacgaaaaatgttgcgggagcgtgctgcttagaacaggctttttaaaggaggccgaagaccaaatcaaaaaaaacacggaaattcttaaaggagagaccatcattactagctgcgctggatgttacaaaaccctcacagaagactacgatggcctggatgtcatccacatctcccagctgcttgacgagctaatcaaggaggggaaactcaagctgagcaaaatggacttggacgtcaccttccatgactcctgtcatttaggacgccactgcgctgtgttcgaggagccacgcgacgtgatcacctcggttgctgatatcgtggagatgaagaatatccgagaaaacagtctctgttgcggagccggcggcggggtgaagagtgcctacccggaaattgccgatcagatggccaagtcaaggatagagcaggcgaaggagacaggttgcaagacgctggtaacttcctgtcccttctgcaagctgaatttggagaacggtgatctggaggtcctcgacctcactgagtttctggttaagtacgggggcctgaacgaaaggcagtga

SEQ ID NO: 9348 - DNA, 1203 bp, synthetic construct
  source 1..1203: mol_type = other DNA
atgaaagacagtgagctggaaaccatgcgaaatagcttcaataccgtgaagaatagatccaattccctcattgagagccccagcgctaagcgactgattagcaggggtcgtgaaatcaaaaagtattcaatcgagaacaatgacgagttactcaaccaggtgtgtgagagctttaagcggaacgacgttgacttcaagatcgcggagacggccgaggatgctctatccatcatagacgatctcctctgtgagtacgattgcaacaccatcgccaaagctaaatcgaacaccctgggggagatcaacctgaaacgccacttggccaatgaaaacattgatgttgtcgagaccgacctgggagacagaattttgcaactcaaaaagattgacaacaagccagtgcatccaactggccctgcgagccacttgaatgtcgacaacatcacggatattgttaatgagtccctggacgtcaatgtgaatcccgtgccccgcgagatcatggaagcagtaaggtacgatgtgctgaagcggctggaaaacgcaaatgtagggataagtggagccaacgcaatagcctctgaggagggatctatcgtgatggtgcacaacgaagggaacatctcgcttgtcagcctaaaggatctgcatataatcgtggccggcattgacaaaatagtgcctacattggaggacgcaatctcaatcgtcaagcttgagacgatcttcgctaccggcaactacgtcacaagctacatgaatgtaatctcaggcccgtccaagacagccgatattgaaaaaaagcttctgaagaacatgtacggggcggaacgcgtcgtggtgattcttctggacaacggcaggagtgacgcaacacaggaatgtctgtattgcatcggttgtggcaactgtgtggttcactgccccgtgtacaacgctgtcggaaacgaatttggctttaacaattatctcggtgggcggggagtggccatgtccaagttcattgaagatgacgagacctgctataactcaggattatatatgtgcactctctgcggcctgtgcactctgaactgccctgtggatatcccaacaaatgaaatcattgagaatatgagaaaactgtccgccgatgccgggttctacccgaaagctcacggcataatcaaggataacgtttctagtaaggacagcccctactga

SEQ ID NO: 9349 - DNA, 714 bp, synthetic construct
  source 1..714: mol_type = other DNA
atgctcctactgatctcccccatcaatcgagaggaagcccttgaaagcatcgaaggtggcgccgacattgtggatgtaaagaaccccaaagaggggagcctgggggctaattttccttgggtcattaaggagatcagggagctgactccggaagacaagctggtaagtgcgaccctcggtgacgtcccttacaaaccagggacagtgtccctggccgcaatgggcgcccacgtttctggagcagattatatcaaagtcggcctttatggaacaaagaaccatgacgaagcggtggaggtcatggaaaatgttgtcaaaaccgtcaaagagataagcgaggaaacgatcattgtggctgctggatacgcagacgcccaccgggtgggggcggtggagccaatggaaattccaaaaatcgccaaggatgccggctgcgacctcgctatgctcgatacagctgtaaaagacggacacacgttattcgattacctggacctgaaccagctaaaggagttcgtggatgaggcccacggatacggtctgttgactgcactcgcaggctcggttaagaaggaccagcttaagcccttgcatgatatcggctgcgatgtggtgggcattcgcggagccgcctgtgtgggcggggacagaaacaccgggaagatacaccataccgctgtggccgagctgaaggagctgtgcgactcattctga

SEQ ID NO: 9350 - DNA, 1485 bp, synthetic construct
  source 1..1485: mol_type = other DNA
atgtcattttccaagaaggtgcaagaggccagaatgagctacacatttgacgatttcctgctgactcccaatgccagctacgtggagcccaaggacatcgacacaagaatcgagctaggaaaaggcattcgactaaacatcccagttctgagtgcggctatggataccgtaaccgaagccgacctcgccattgctatggcccaggaggggggagtaggcgtcatccaccgaaacatcacccaggaacgccaggtcgaagaagtgaagaaagtgaaaaatgccgaggacctgacaattcgggacgttataaccatcactccggactccactattgcagatgtgcagactaagatgcaggacgagctgataagcgggctcccagtggtggagggggataagatcatcgggatcatctcgaaaagggatattaggcccgttctcaagtcagagcctgataaaactgtcaaggatatcatgacatcggatgtggtcacagtggaggagggagtgagcgccgaggaagcactgaacatcgcttatgagaacaaggtggaacgtctgcccgtggtccgggatggcaagttagttggaatcctgaccatcaaggacatcctcaatcaggcacagtaccctaatgccgctcgggacaagaacggcaactatctggtggcggcagcttgcggaccatttgacctggacagggcaatggcccttgaccaggccggtgccgacataatttctattgattgtgctcatgctcacaacatgaatgtcgttaaattcacagagaccatcaaggacaacattgatgccgagctgtgtgtcgggaacattgctacggcggaggccgctgaggacttgatatccatgggtgtcgatgcacttaaagtgggtattgggcccggttcaatgtgcaccacacggatcgtggcgggtgtgggggtcccgcagctgaccgccattagcgatgtggctgatgccgttgaagacaccggtgtacccgtgatcgccgatggggggatcagatacagcggcgatgtggcgaaagcaataggggctggcgcagacgccgtcatgctcggcaatttgctcgcagcctctcttgaagcccccggagatattgtggtcatgaatggaaagcagtacaagaagtaccgcggcatgggctccatgggcgcaatgaccagcgagtatgacggcggcgccgaccgctacttccaggggcaaaaaagtaagatgaaccacactaagtatgttccagagggaatcgaaggagctgtaccttataaaggcacggtggcagaaatactcttccaactggtaggaggcttaaaatccagtatgggatactgcggcgcgaaggacattgctgccatgcaggaaaaggccaacttcgtgaggatcaccagtagcggcattaaagaatcccaccctcatgacttgctgatcacgaacgagagccctaattacccaacgcttgactga

SEQ ID NO: 9351 - DNA, 270 bp, synthetic construct
  source 1..270: mol_type = other DNA
atggcccgcactaaaaaagtgggcatcacagggaggttcggggcacgctacggaagaaaggctaagagaagcgtcaagatcatcgaggaaaacatgaagaagaaccacgtctgcccgaaatgcgcgcgtccttatgtaaagcgacaggctgccggaatttggaaatgccggaagtgtggcgccgtgtttaccggtggcgcctacataccacagacccccatggccaagagcgcaacgcggaatatcagggacattaaagtggaggaatga

SEQ ID NO: 9352 - DNA, 132 bp, synthetic construct
  source 1..132: mol_type = other DNA
ctgtacaggtgcccaagctgcggcgccgaggtcgaccacaagagctacatggaaaacaagtgtcccaagtgcagatatcgcatcctcttcaaaaatgtgccggagaccacacggattatcaaagcacgatga

SEQ ID NO: 9353 - DNA, 486 bp, synthetic construct
  source 1..486: mol_type = other DNA
atgctgatttccaccagccgaaagccatcgcagaagacccggaagttttgcaagaacttagcccacgccacagggagcatttccgtgaacagaggcaagatgaacatgcgcgagctgctgatcaaagcattggaagttgaggagtacaacctggctatcgtcaacgagattaaggggaatcccagcaggatttcattttactccaacaaaggtaagttgctcctcacgctgataatcggagcaagcgaagaaaaagagaaaatgaacatcgccccgtctcagctgaaaatagtgtctgaagtgaaagagctcaatatcctgagtgaaatccttgacatggatctcgtcgataatgcggagagtaactatatccttatatccgaagatgaggacagcctagctaatattaacttcatcaataaattcggcgacatgaacaacttcaagattaatgtaaagaagatcctggaggtgtcaaatgactga

SEQ ID NO: 9354 - DNA, 267 bp, synthetic construct
  source 1..267: mol_type = other DNA
atgattgatgagagtcccctcgagagggtgcgcagcaacatagtgattgaatttgaagataatgcccaggctaagattatctacgattctattatcctggaattttcgaccgcgccagacttcagatcatccatgacgattgacctggacgagagtaacatcataatcaacatcgatgcagaggactccacctccttccgggccagcgtcaacagcgccatcaagtggatcaaactggcactagagatcaatgacctcacaaattga

SEQ ID NO: 9355 - DNA, 348 bp, synthetic construct
  source 1..348: mol_type = other DNA
atggagattcccgagaacattcaacagcagctcaatcagtttcagcaactccagcagcaggcccaggcgataagcatgcaggtacaaaacgtcgagatccagatccaggagacagagaaggctctggaggagctgaaaaaaaccgacgaaagcactgaggtcttcaagcaggccggaacactccttatcaaggtggaatacgccgatgcactgtccgacatggaggacaagctggaaacgctgggcttgcgcaaacagaccatgtcacggcaggaagaaagggtgatgaagaaactagaggaaatgcaggcatctatccaaagtgtgatgcaggggatgggccaatga

SEQ ID NO: 9356 - DNA, 285 bp, synthetic construct
  source 1..285: mol_type = other DNA
atgagcaaactgaaaacactctcacaggatgatctgtcctctattagtgataagttcggcgagattcttgagaaggaaataagcaaaagtatctcgatgaaggagctcgaggatctagacttagatatcatcctcaactacgaaaacgagcagctggacgtggacgtgaatgtgggggtcttgtttgacgaactgtccgagatcacccaagaccaggtaatgcagagcatcgacgaagcctatctgaagttcgactcctacattgatgacaacttccggatgtga

SEQ ID NO: 9357 - DNA, 690 bp, synthetic construct
  source 1..690: mol_type = other DNA
atgatcaaaaagatcccagtgatcgacctgaaacaacaccaggcagtaagcgggaagtcaggcatgagagacaagtatcagcccctgaaaacagtgttcgccaagagcgccaatcccgtggaaattgctcagggactgaagctgaacggggcaaccgaaatgtacatcgctgatttggacctgattgaaagcgtggggcacaacatcaacgatattaagatggtgaacacaatcctgcctgtcatcttcgatggcggcgttaagaattgcgaaggattcgaatttttcctcaattacgcgtataagatcataatcccgaccgagacgctagagagtatcgacgagatgcgcaagatatttgaaaaatacccaaaggagaggattgtcattagtgtggacgtgaagaacggtgagctactggccaaacatctgaaccttaatctgtctgagtttaaagagatcctgaaggagcttgatcccaatgatattatcatcctcgatatttccagcgtcggcactgaacggggctacaacaaaaagttgcttgaggagttcggagacctgaaagaaaaactgatcattgggggcgggttaaacaaggactccctcgttgagttggagtcactgggtataaagaaagtcttaataggaacctcgctccactccggcgaggtaaagctcctcgactga

SEQ ID NO: 9358 - DNA, 180 bp, synthetic construct
  source 1..180: mol_type = other DNA
atggccatagtgggcacaaccatattttcacacatccttcccgtgatttgtggcttcttcggtatcgtaatgattatttccggaagcctcgagaaaagcaacagcaagctggggctagggatcgtgctgtttatcatcgcatgcatcttcccatacctgattttgagtgtcctcgtctga

SEQ ID NO: 9359 - DNA, 849 bp, synthetic construct
  source 1..849: mol_type = other DNA
atgagaatcgacacacaccaccaccacaagaaggccggcgagaatctagcatttgtgtttttcatgaacttgacgttcaatataatcgttatagccgggggtctcgccaccaatagcatggcaatcctggctgattgcatccacgatatgtccgacacaatctccatcgctttcgcgtggtttctggagcatgttgcgcagaaggattcaaccgataagtactcttacggttaccagaggtttagcattctgggcgcggtaataatcagcattttcgtcatcattatggctctgttgatcctccaggaggctattccgcgcctcttcgcccccgaaagtgttgacgcaaatggaatgctactcatggcaattgtgggattggtattcaaatccatttcagtgtaccggctccatgggggcgaaaccttcaatgagaaggccatcctgctccaccagctgggggatgtcctcgaatggatcaccattttaatacttagcttagtgctgatgttctgggacggcgccccttacctggaccccttcgtcagtatcggaatcgccctgtggctgatatttaaccttggaatgaacttgtataaatcggtggaggtgcttcttcaaaagactccaaaccattttgatgtgaaagagttcaaagtcaacgtgctgaacatcgaaggcatcaaaagtttcgacgactttcatgtgtggagcctggatgggatcgactctgtgctgacactgaaggtgtctattgatgactggaacaatcaggaaaagatcaaaaacgacatttataacattgcctccaagtatcacatagtcgacattactatcgagtttgactga

SEQ ID NO: 9360 - DNA, 885 bp, synthetic construct
  source 1..885: mol_type = other DNA
atggtggaaaagggaacagatgtactgaaagaaggcttcgctaaaatgacaaagggcggagttataatggatgtcgtcaacgctgaacaggctagcattgcagaggacgccggtgccgtcgcagtgatggccctcgaaaaagtgccagctgatatccgggctgcggggggggtggctcgcatggccgaccccacaatcgtggaagaggtggtggacgcggtgtcgataccggttatggccaaagcgagaattggtcacatcgccgaagcacagatcctcgagaccctgggggtggacatgattgacgaaagtgaagtactcacccctgccgatgaggagtaccatattaacaagaaggaatttactatccctttcgtgtgcggggcacgtaatctgggcgaggcgctgaggaggatcgatgagggggcagccatgattcggaccaagggtgagcctggcaccggaaatatcgtagaggctgtccgccacatgcgcatggtgatgggtgagatccgaaccgttcagggaatggaggaagaagagatatggaagtatgccagaaaaatagaggcacccattgacctggttaagaaaactgcagagctaggaaagctgcccgtggtgaactttgcggctggcggaatcgccacgccagccgacgcctctcttatgatgcaattagggagcgacggcatctttgtcggctccggaatcttcaaaagcaacaatccagaggccttcgctaaggctatcgtcgaggcaactgccaactacgacaagcccgaggtgttggccgaggtctccaaggggcttggccaggccatgaagggcattgaaatgtcaacactgacggaggccgaccggatgcaggataggggcatctga

SEQ ID NO: 9361 - DNA, 813 bp, synthetic construct
  source 1..813: mol_type = other DNA
atgactctcgtgattatcggcccggtcacccaggacctggttgtcattggggagaagagcactcacaaaatcggtggagccacgtactttcagtcctttgtgttcgagaaattctacaacgactacttggctatcgtcaactgttctgacgagaagatagctaacgaatttccatcaaaggataaggttaaggtgattctgaaggagtttacccacttctttatcaacaattacccagatgtcaacaacaaagactaccgggagcaattgagtaatttcgtgcagatacccatcttcaagagcgatctggagaaaatcttacctaaaaagattgatgggttcgttattaacccccttaataggcatgatttcccaatcgagacaatcgactatctgaaaagcttcaatgtgcccattttcatatcaatccagggattcctacgaatccctgatgtggaggtaaatggcaaatatgccatcaaactcggtacctttgacaagctgtccgatatcctggaaggggtcagctcaatcttcctggatgaaggggaagcgaacatcaccggaattgactttgacgtagacgaagtggtgataaccgacggcagtaacggctcgcggataatcagcgacaatcacgaaacgaagatcaacgcggtgaaatgcgagaatatcgcagacgcaacagggtgcggcgatacttacatggccgcctatatttccaagagactcaacgactatagcattcgcagctccggcgagtttgccagcgacatttccagtaagaagcttacaaagttcggacattactga

SEQ ID NO: 9362 - DNA, 585 bp, synthetic construct
  source 1..585: mol_type = other DNA
atggtcaagatcggaatcctgaacctgcagggggctgtgagtgaacattacaacataacacgaaaggcagtgaaaaatatgggtgttgatgtggaggtagaaagcgtccgctacgccgaagacgtggaaacttgcgatgggcttatcatttccggcggggagagcacggtcataggcaagctcatcaaacagcggggcatcgataaagttattaaagagaacaatattgccgtgttcggaacttgcgcggggatggtactcctgtccaagaagaccgactttaaccaaccgttaatcggactgatggacattgcagtgaaacgcaatacatacggcagacagaaagactctttcgagtgtccaatagacatcttcggtaagaagtatttgggcgtcttcatccgggcccccgcccttgacagttataaccactcaaaggaagatattaaggtgctgtccgtgctggatgacgagatcattgccatccagcagggacctcatattgctatcagctttcaccccgagctaaccgaggacaccctcatccacgagcactttatcgatggcgtgataaacaggtcgtga

SEQ ID NO: 9363 - DNA, 7176 bp, synthetic construct
  source 1..7176: mol_type = other DNA
atgcttaataaatcctccaacataatcgagaaggagttcaagaatctgcgtaaggagctgctggatcttactctccgcaatcaactgctgaacttcaagagccgcgctaaaaccatcacgatagtaaaccagacccccgtaaacctgtttcagaccttagtgttacaagacaacaagatgtatttcgtcgcgaataaaaaggataagaaggaagacaagtccagcgtctgggatcacattccctttgatttctcaaagtttagcgaaggggacaagaagctggccactgagttgacccccaaagagcttcagaagcgactctattacattaataaccaggccaaaacaatgctacaggagcagggctataacatcttgtacctggccatcggttttctcgagtggactgacaaaagcaagccaaaacagagaaacaacgccccacttgtgctgatccccgtggcaatggagagaaagaaggttggtgaatcattcaaccttgaatggaccggagaagacatccagaccaacatctcactcaaagccaagctgctcgaggcagggatcgactttccggacttcgagttcaagcgctacggcgaggttatcgaccattacattgcaagcgtgcggcggtccgtgagtaaaatggacggatggaccgtgaacaataatgtcgccctcggtttctttagttttacaaaatttgtcatgtacaacgacctgaatcctgaggcgtgggaggacaacgtggacttgacgaaaaacgagctcatccaggctatttttaaccctgccaagaacgaccacgagtcatttcgcgaggaagacatagacagccgcctggagtatcagaacatgtatcaggttcttgacgccgattcctcccagattgctgctatccaggacgtgaaggccggacgtaacctggtggtggagggtccgcccggaaccggtaagtcacaaaccatcgtaaacttgatcgccgagttactggccgagggcaagtccgttctgtttgtctcagagaagatggcggccctagacgttgtaaaggacaggctgacaggggtggggctcggcaagtttgtgctggaactacactcccataaaacaagaaggaaaaaattccttaaggaattgcagaaagccactaatgtacagtctcaggagcccctgaacatcgaccagactatccggaagttggagacgttgcgtcggcagctggacgactacagccagattatacacaaaccagtgtttgccgttaatctctcagcctttcagctctatggcatgaaggagtcggccgatgaccatttcgccaccaaaaacgcactgatgcccctggtgcgattcgataacccggagtccatcacgctgaaggatctggacgacatgaagatcgctttagagaacctcgctgaactctaccaaaccatcagcaaggagaacccctggagtaagtgctctccaaaaagcctgcttcctgcggacttgagagagatcgagatgttaatcggagactccctgtacgctcttgacaatttcctagttgagcggggcagggtctacgatatttatgggattaagaagccagatacgttaaatgagtttcaaaactccctttccgcgtttgaaataatcaagtctcaaaatgccgagctgatagatggaaatatattgaaatccggcgcctggaataacaacaacgatgatgcattcaagctcatccaagagctccagcgctaccaaaagtacgctgagaccttaaccaagttcaatcaaagcattttccaagccgacattgacggactggtctacgagctgcgcaacatctccaacaagaagttccggttcttcaacaacaagcagcacattgagctagttgagcgatattactccataccggttagcggcagtgtggacgatatcataagagagctccaggaggccaaaaccataatcaacattagaaaaagtctggaagccaataatgccctcgggcaaaagtacttcggcggttactggcatcttaatgcaaatatcgacgatctgaatgctatcgcaaaatggatgcacgagtttactgccctggtacacgagggcacattcagcgagaatacgattgagctgatgagtaaagacctgttcgacatcaagcctgagagagacctttcagactacatcgacgcgggagaggaatttgtgcacgtcttatcacgcctgaaggacaaattgaatccccgaagcaaactcatattcaagcgagagacgggggatgtgccatttgagtcatggaaggaacagctgtataactggagagggcagctatccagcctccacctgtggtctcagtacttgaacaccaaaaactccctgaagtcttcaaatgctaaaatgtttgtagacagcatcgagaagcgcaacatcaagaaggaggatattgaagcacttgtggacggcaacttcgccgattcactcttgaatatattgttcgtggaaaaccaggagctcgcaacatttgtcggcgagctgcacgaaaacaggattcgggaatttaaagatctggacaagcagattttagtactgaaccggaagaggatttatcagaaactgaacagcaatattcccaagatttttggcggaactgaaaaccctcaggccaagatactcgccggtgagttcacacgcaaaagcggacacatgccagtgcggaagctcctcgagaagaccggcggaatgatcaagcagatcaaaccttgttttatgatgtctcccttgtcaattgcccagtaccttgaccccacgaatgaagagctgcagtttgatgttgttatttttgatgaggcaagccaggtgaagcctgaggatgcattaggcgcattcatgaggggaaagacagccgtggtcatgggcgacacccaacagctacctcccacctccttcttcgaccagatgagcgacgccgagagtgatgaggaagaggcgacttccctggacatggaaagcatcctgcatttgtgtaagttgtccttcccagtgaagatgcttaaatggcactaccggagtcgccacgagtcacttatcacagtttccaacagggaattttatgacaacgacctgcttgtgtaccccagccccagccacaatgatcctgagctgggtctgaagtttcactacaatccaaacaccgcgtaccacagagggtccagctctgccaaccccctggaggcgcaggatgtggtagaagagatcttcaaccattttgagaagtacggtgatacaaagagtctgggcgtcggaacattctctgtggctcagaagaatgcaatcctggaggctctggaagtcaaacgtaaagaaaggcctgaatttgagcctctcttctcggataataaggatgagcgcttctttgtgaaaaacctggagacaatccaaggggacgaaagggacgtcatactcatcagtgtggggtacggttacgatcaggaccgcaaaatgagcctgaacttcgggcctctgaaccagaacggtggggaacgcaggctgaacgtcctgatcacacgggcaagagagaagtgcgtggtcttttcaaacttcaaggcttatgacatgaagctgacagcgaacccaccatatggggtcaagtccctaaaggagtttctggaatatgctgagaacctcaccttgggcaccgacaatcaggactcttatacacgggaacccttcgaagatgctatagccagtttcctggaggagaacggttatacagtggatcgccagattggctgcgccggctttagggtagatcttgccatcgtggacgacgagaatccggggaagtacatcctgggcattaccacggatggcaaaatgtattcttccagtaaggtcgcacgggaccgggaccgcctacgtgagcaggtcctgagcggccttggctggaaattgtaccatctgtggtcaacggactggtaccggaacagggatctgggacggaagaaactcttggatttcgtgcagaagtcaatccgccagacccgcgaagaagagaagcgtaaatcagaagaagagaagaaactggctgaaaagagaagactggaggctgaaaagaaggctgaagagttgcggatcgcacgagagaaggaagaggccgagagaaaggccaaggaagagcaggagacgaataatgaaataaacatcggcgacatcgggcccgcagacttcgtggaagtggagaaagtggacgacggggatttcttggaaaagccgatcgatgttagtagcatcaatcctagcgaatttttcgaagaggaaccctccaggaatagtataaacgaggataaaacaacaaaagagactccttccgagtttgtcagcattgagcatccggataaggatgtggatttcaagaataactcttccgaagtggccaaccagtactcttctgacgacgagagcttcgaggtgaggaataacgacttcaaagacatcgagagcgagcatcctaagagcgacgaagacgatgacgaagtcaagattgagtcgctggatgatctcaacgccgatgagtataatgaggagaacgaaagctatgaagagattcataaagaaaacactagcaaagtcatggaaaatgacgaagactactctgatgagtcggatagtatttccaaaaagctgtctgataaattcaagagcatcctgaaatctgatgggcaggagcaggaagagaacactcattccttcttttcatccagcaaatttgcaaaggatctcgggaaaaattccgacctcaatgatgagaaatccttcgaagtcaacgacgaatttgattcaaaaatcaatgagtatactgacaacgaaattcttgaagaaaaccccgtcgacctggatagcaaagaggacacctcggtaaatgaggaggacacttcagacttcaaaacaccaaaattcagtaacaaaatcgaccttgaatctgacgacttcattgtggttgatcacgaagacaacgaggtgtcgaagagctcgtccgagaatatcgaaaatgacgacttcatcgttgtggatcacgacaatgacgaagtttcgaagtcctcttctgagaatattgaaaatgatgatttcatcgtggtggattatgaagataacgaaattgatgaaaaccagaaatactcgtctgtgggctctgatctcgacgatgaggtgataatggactacaatgaagtgcccaagaataaatcttacagtgacaaaaccgaggatatctccaatgagactacggatgacaaggtggacctcgatcctgaagaggactacatttatgtggaccacagtcatgacgacgagcgggtcctggatgaggatgatgtggagaagttcagtttcaaaagcgacgagatttccgaagaaccggaatttgaagtggacaaaaaaccacaaggccagaagcagtatcatcgaaaagggagtaccttcgtcaaatcaatcatcagtgatgttgtcatgggcgagtcccatctagagcaagaagaagtggaaaccgtgaagggggaaatcattgaggaggacgaggattacgactacaaggacgctccaagtgatgattccgttgtggaagcggaaattgtctacgacgatgaggagctgaacattctcaatgacaacctgcctgacgatgccctggaaaagcctactccgaagcacgtgtatgacgacgaggagctgaatattttcaatgacaatcttcctgacgatactcttgagaagcccgcccctaagagaaaccatgacattgaaaacgacgatctggacaagcccactccaaagatggattatacggaaggcgacgaactcaatatattcaccgacgatctcccagatctgaacaaggaggaaatcaacagaaacgccaccgacattgtcaccaaggcaatggaagagttcctggaggacgtctttgagaacgatgatgacatcgagaaaatcgaattggaaaacgagatcaaggaggacattccccaagataatgagatggttattgaggacaagggaataaccgagcacaatatagaggaaaccagcaacgatatcggtgacggcgtgacttactaccagggctctaatgatgtaagaagtaaacttcgcaaaaacaacttctactatgaggaagagaaaccaaaatctgtgcgagagtccatcaaaggaattaaaaaggacatggagtacatcaacaaatcgctaaaggaaatcgagaaccctaccaagattgactatgtctctgtggtggaccgaactgaagaatacgaccccatggattacctgaatatccccagtgatgacgactcggacaagatcatagagaaggaggaagagctcacattcgccgaaaaggaagagctcaggatcgagaaggagatgatgatggatgatctgaagaaagaaatcaaggaagagaaagatgtcatcgtgcccgtgcacgaacaggataggcgagaggagctcaaggatcaggcactggagaatatcatcctcagcgccaacgaagattacaaggaaatagagcgggaacgccggagaaaagacaatcagtttaagagctttgacgataacaaactcccgggaaagcgaaaaatggaggacgagatcgtggattatgtccacatcgaggatattggactccactccagcgacgagttatacagacagagcatagacaaaattgccaagtcgatcaacgacatcgtagacatcgagggtccaattcacgttagtgaggtgacaaagagggtgaaggagagctgcaacattaaaagggcgggagctaacctgaaaaaacgtgttaatgaaggcatcagtgaggctgagaaattgggatatattatccggattggaaactttctgtatgattctagcaacaacaacatcgtcatcaggaagagaaacaagccaaacattgagctgatctcagacgaagaaatagctaagagtatcgagaccgtcctactgcacaagcaaaatgtgacaaccaaacagattgcaaaggaagctagccggaacttcgggttcaagtccactagcaaaaagacagctaccaggattaatagcatcctcgatttaatgattgctaataataaggtgaagctggataaagacattgtggagctgaagtga

SEQ ID NO: 9364 - DNA, 1752 bp, synthetic construct
  source 1..1752: mol_type = other DNA
atgtccaccaaagttaagagccccgataacctcccaaacaaacctggcgtctacatcatgcgggacaatacagacacgatcatttatataggcaaggcaaagaacctgatcaagcgcgtcaagtcttatttccgcgagaaacttgataggccaaagacccaagtgctgatgtcccacttcgatagtctggagtatatcgtcaccaatagcgagaaggaggctctgatcctggaggccaatctgattaagaagcatcgcccacgctacaatgtccagctaaaagacgacaaaagatatccttacgttaagattactgacgaggaatttccacggctggtcatcacacgaaacgtaacaaaaaacggggtgtacttcggcccgttcacggacgtggggtccgtgaagcagaccgtgaaattcttaaaaagcctcttcaaaatacgaacctgccggaacatgaacgggccttgcctcaacagtcagatagatctgtgctacgccccctgtgacggaagaatctcgaaaaaggagtatagcgaaattatcaataagattgacctgttcttccagggaaagtactccactattgtgaagaacctcaaaaaagagatggcggacgccgctgggaaggaagagttcgaaaaggcagccgtgatcagggaccaaattagctctattgaggagataatggaaaagcagtttgtggacttggttgacgatgacctggatcaggatgtcatcgccatggctatggggaaaaatgaggtggtcgtaattataatgccgatcagaaacggaaaaatcgtgggccgtgacgactttctgatgagtggctctaagtacgattcaccctcagaagtgatgttttccttcatacagcagtactacggctacaaccgccatatcccaaagcaaatcctgctcgatgaggacatcaatgataaaaaactcctggaggattggttgtccgacttgaggggcaataaagttcgaatcaaaatcccccaaaagggtgtgaagctgaggctggtcaaaatggctaagaagaatgcggagatcattaaacaccagaagaaaaagatggaaaattccttaatcgagcttaaaaagtaccttaagcttgagaggataccccatgtaatcgagggatacgatattagtaatatctccgggaagtttgcagttggttcgaaggtgtcatttaaggatgcaaagcccaacaagaagatgtacaaacactttaagatggaaactcccggcccgaacgatttcgctatgatggaagaactgttgacccggagactcaagctgattgacagcgaccccgaacccgacctgattgtgatcgacgggggcaaaggacagctaggtatggcctgtggtgtattggagaaattaaatctgacccacatacctatcatcgggctggcaaaggaatttgaagagatctatattccaaactcaaagcggcctatcattatccctaagaacaacagggctctacacctgctgcagcaggtgcgggacgaatctcaccggttcgcgatcacataccatagaaaactccgcagcaacgatattcaggccagcagcctcgacgatatcgtgggaattggcaagaagcgtaagatcaatctccttagagaatttggaagtgtcgataacattaaggaggcctctattgaggagctcgccaaaatagacggcatgaaccttaaaacggccaagaacgtgtataattattatcactga

SEQ ID NO: 9365 - DNA, 540 bp, synthetic construct
  source 1..540: mol_type = other DNA
atggtgaaatgcccgcgatgtggctacgagaatagctccacagcagtttattgcgataactgtgcctaccttctgacagatagcgagggaaacaggattgataactccccccgcgtgtcctcatggaacataagtttcgcaaaaaagatcgtgatcgtcctgggaatcattgttatcgccatgttactattctcattcatctataataacacccagccttcccatgaggactctctgaacttgataacggacaatggcactgtgcacaagaccgcttcgtacccctataaggcggtcattgaatatgagggcagttggggggccaagatgggggacccaaattacctcgtcagcgaggacggttacggcactaagagctttgtcctcgattgcgccgcgtgggacagagtaagcatcagtgcccagaaatatgactacggtgaaggggagctgcacgtgaaactcctgcggaatggcgaagtggtcgctgaaaacagcaccacaaatgtgaccggagctgtggtagtgaactacaactga

SEQ ID NO: 9366 - DNA, 306 bp, synthetic construct
  source 1..306: mol_type = other DNA
gtcatcaaggtggcaagcgaagacaagattcaggaataccagaacatcctggaggaggagaagcttatgattgagacgcacttcgtgaacatcgaacggatcttaaaggagcccgagaaaatcgagaaagacaaaatattcgccctaatgaacagctacaataccctcaatatccagtatgagcagctgtgctccgatctgattgaatttatcaagatattcaagggcagtgaccaggaaattaggctctacaagacagatgaattgatcaacctgctggagtcaaaaattaatcaaatggactga

SEQ ID NO: 9367 - DNA, 1704 bp, synthetic construct
  source 1..1704: mol_type = other DNA
atgataaaggtggagaatgtcagtaaggattacgaactggccgacggaacgaagatcaccgctctcaagaacgtgagctttgaagtgaaagagggggagattctggggatcatgggcaagtccgggtcaggcaagacaactctgctcagagctctgaggggggtggagcatatagacaatggaattattgaagtcggcaaagcaaaggtgacgagcgaatcatctcagttttactacaacaacctgaagaaagagaccgccatacacctgcagcgaagctttggtatctggcccgacaccgttcgggagaatgtgctgagaaagctttatgcccggcgctatttcgacgagggggatactaattttgaaatcgccgagagcgagtttggaaaggaagctgacgagctcctcgagctagtgtccctgaccgataagcaagaccattacgccagcgtacttagtggcggggagaagcaacggctgatcatggcacgccaactggccaagcaacccaaagcgctgcttctcgacgaacccgccacgatggcgtgcccaaagacaaaacaggagatcttggacgcggtcaaaaagatcaacaaggaactgaacatcaccgtggtggtcgtctctcatctgccggatgtgcagaaatatctggccgacagggttatccttctcgaaaacggcgaaatcgccgaggagggttcggctaacgaaatctgcgataaattcatggatgaaatggatgatatcgtggacatcgacaacatcgcaactgatgaggatgtgattcaggtcaatgatatctacaagagattcttcttgctgaccggcggggaggtgctgcagatcgaggacgtgaactttaccgtgcagaaagaaaacattctaagtatcattggtccaagcggtgccggcaagaccgtgctgttacgcatgctcgggggattggaggaccccgatgagggagaggtcctctacaacgtggacgacgagtggtccgacattgacattcccggcatgggccggatgaagataaggtctaaacttggcttcatgcaccaggaatttgccctgaatcactacagcacagttctgaaccagctggctaccaggttgggctataaaaatcagaatattgttaaggaagctcagcagagagcgaggaagattggcctcagtgaggaattactcgattcgttctacctgctcacggacctgcctgagatagaggcacgtgaccgattgaagaaagtaggacttgattcagacatcctagatgacctcttcccacgatttcctgaaactgctacaaaagaagccgttgcagacatattcgagagccttgatttggatatgagtatcttacaccgcaaaagctatgagctgtccggcggtcagaaggtgcgggtcatgctggcactgattttagtttcccggcctaagttcctacttctcgacgagccattcggagatttggacccggtgaccctgcgcgacgtcacaaacgccctgaaaaaaatatcaaaagattacggaattacaatcgtaatgatttcccacaatactgactttatcaaggaactgtccaacagagccgtattcatggacgacggaaaaatcatcgacgatagcgaggatattgacaagattgtcgacaatttcatcgatttctgtcacgctgactatctcaagggggagtga

SEQ ID NO: 9368 - DNA, 426 bp, synthetic construct
  source 1..426: mol_type = other DNA
atgttcgacatcatcgcagtcccggtagacgggagcgactacggctacaaggcagcggacgtcgctatagaaatcgcccaaaagttcaactcgaaaattgccgctgtgcatgtgctggaggagttttcttttagcagctatgattcagaggaagatgaggggaactccattctgagtaaaatcaccaagaaagcgaacgatgtcggagttgaggtgaccgaacacttgctaacggccgatcccctgcgagacatgaagttcatagtggatcagacacgcgccgacctggtggtaattcacgcccacggcagtaacaataaccggttcgtcagctttgaggaaaataatgtgtccgacactcagatcggttcagtttccgagagactcctcaggacatctgaagtgccagtgcttctgatccggtga

SEQ ID NO: 9369 - DNA, 168 bp, synthetic construct
  source 1..168: mol_type = other DNA
atgatcgtgaaggattggtgcagcttttgcggcgagtgcgcgggggtgtgcccacggaacctcattcaggtcagggaatacagcctggtattcaatgatgacgactgtaaagattgtaacacctgcatcaaggcatgtcccatagacgccctggaaaaagaggactga

SEQ ID NO: 9370 - DNA, 1179 bp, synthetic construct
  source 1..1179: mol_type = other DNA
atgatcgaaactgacgtgatcgtagttgggagcggccccgcaggatcaagtgcggccaaacacgccgcgcttgggggagcaaaagtgattctgatggacaaaaagtcggagatagggtcaccaaagagatgcgccgagggggtgagcatacagggccttgagaaactgggtatagaaccttctcctcggtgggtgacccaggaaatccaaggtgtacgcatccagactcccgatggaacagacacatggttgacaaaagacgaggtgaagctcccggaggccgggtacatcctggagaggaaggtctttgataagcacatggccatggatgccgcccgggcaggggctgaaatccgaatcaagacgctggtgaccggaattgagaagattgaaaacggctatttggtctttaccgagtccatgggcaaggaggaagtcttcaagtgtaaggtattgattgctgccgacggccctgaagggcacattgcacgctgggccgggttaaggccggctgcaaaagctaaagaaatggagtccggagtgcagtacgaaatgtgcaacgttgagtttgagaaaccaggagtcattgaattttacctcggtagctgcgcacccggcggttatgtctggatcttccccaagggggacgacatcgctaatgtgggcctggcaattctgcctcacaaggctgagaagaccgccattgagtacctcgatgacttcgtggcaaagtccccctacctgaaaaacgcccaagccgtggagataaatgtgggcggcgatcccgtgggtggcatgaccaaaaaactctacgacgacaatatcctcgtctgcggagatgctgccggacaggtcaacccactgaccgggggaggaatcatcagtggcatgaccggtggcatgtgtgctggccaggttgcggcgcaggccattaaagaggattgtagcaagaagttcctcaaacaatatgatgagatggcgcatgctgaactagaccacgaaatcaagagatataaaaaggtgcaggagtacctgctcacgctgagcgacgaggagttaaacgagatcgcccatgccttcgagggcgagactttcgaaaagatctctacaacggaaatagttaagaaactaatcaagctgtccccaaaggccctgcttaagctgggcaagttcatttga

SEQ ID NO: 9371 - DNA, 969 bp, synthetic construct
  source 1..969: mol_type = other DNA
atgattctgatcactggtggggcaggctatatcgggtcgcatacaaacaaggccctccacaatgcagggtacgacacagtcgtggttgacaacttatgcaaaggctatgaaaactttgttaaatggggaaatttcgaaaactacgactttggaagtaaaactctcagggaggtgttcgaaaaatacgatatcgacggggtgattcacttcgctgctttttcaagcgtagcggagtcagtggagatgccccagaagtatttcaagaacaattataagaacaccctgaacctccttcagataatgagggagtttggggtgaacaagttcatcttgtcttccaccgccgccgtctacggaaaccccgacaaagtgcctatcactgaagatcaggacctcaagccaataaacccttacggccactccaagtttatcacagagaaggccctggagagagaagccgagaagaatgacttcaatttcgtgtctctgagatactttaacgcagccggcgcggacttcgattgcgaagtgggcgagtttcatgacccggaaacgcacctcatcccactggtgctggatgcggccatcggaaaacgcgagagtatcagcattttcggggatgattataacacggccgacggaacctgcgtgcgggactatatccatgtaaatgacctagccgatgctcacatccgagcttacgagtacctgtgtgacaaaaacgaatccaatattttcaatcttggaaacggtcaaggctacagcgttcgggaagtcattgacatgtgtaagaaggtcaccggccgggacttcgaggtgaaaattgatgagcgccgtgaaggcgatcccgatatactgatagccgatagcgcaaagatcaaggagaagttgggctggaccccaaaatacaatctggagcagattgtcgagagcgcttggaagtggcacaagaaaatcaatgtcatttga

SEQ ID NO: 9372 - DNA, 894 bp, synthetic construct
  source 1..894: mol_type = other DNA
atggagaacgaaagtcatgaatcaaagatcgatgtgcggataatagtctccggtcttgacattgcacagctagtctccaaggcggtgaacaatattcacctggagaacgattataatatcgtggtgagcagcataattccgaccgtagaactgagcatagtcaaaaaggtggccagcggggccgacattctgctgattggcggctatggtagtgatgaaacctataacattctcttcaatgagctgaagacagatttcaaccacattggactttttgactacaacaatatcatcgttgaagacgaaagcattgactttaagctcgctgagaaggagattcttaatagcatcatcaagtcaacattgtcttactccctgaatctgatcaacgttcatacactggagaacaagctaatgaaagtgacccacaactacaacaatttactggacgattacaatcaggtgctcaaagaaaacgaagtactttctcaggagaataacgagctcatggaggatatcaaagagctgaaatcggactttaacgcatttaaactcaggtatgaggatatctactcgaaggagattctggaaatcttcagtctcgatgacctgtggcaagaaaccttccgacaggatttattggatggggacagaatcgtgatcgccactgacaagttcaagcccgacgatatcctggtgggccagggcttcattgcttcacaaagcaaagaaaaagccatcgagtggctcaaaatcatccgcactgcgctgatattcgtcgacgacaacgccggggacttgaagaaggagtccggaatcggagaggaggagaacatcccagaggacaaggacgattacgacatgtccaatacgtttgaaaacttctgggactga

SEQ ID NO: 9373 - DNA, 1422 bp, synthetic construct
  source 1..1422: mol_type = other DNA
atgcagggcgagatagaggataagtgtggtattgtcggaatccattgcccagacgaatcaaagaacgtggcctcttttgtgtattattgcctctatgctctgcagcaccggggccaggagtcagcaggcattgccaccttcaaccccgagaaagggctgaattactactgcggtatggggctaataaccgatgttttcaaagactacgagatccagaatctcaagggaaacatggcgatcgggcacgtgcgctactccacaaccggccagtcccggctggaaaactcacagccattcgtcaccgactttgatgatggattcattgctatggctcacaatggagacatcgtaaactccgctgagctgagaaacgaattggtcaaggaaggctacgagtttaagagtgacacggactccgaagtgatctgctacatgctgaagcgagaacactatgacaataacaaaaatataattgacagcatagaatctgtgagcaaaaagcttgtgggcagctatgccctgacgatactcgtaaatggtgacctgtatggcgtccgtgaccctatgggaatcaaaccactggcagtggcaaagagaggcgacgagtttatcctcgcaagcgaaactgttgcattcgatgtcatcaacgctgaatatatccgagatatcgaaccaggcgaagtggtgttctttgagaatgatgagatcaacagccatatgttggagattgccggggactgcaagatcagccattgcatgttcgaatacgtgtacttcgccaggcccgacagtacaattgatgggattaatgtgtatgagacgcggatgaacatcgggcgccagctccacgagctgtaccccatcgacgctgacgtggtaattccggtgcctgacagctctatccctgcggctatcggctactcacgcgcctccggcataccatatggagaggggcttatcaagaacaggtacgtcggaaggacattcatcatgcccactcaggaggagcgcgagctggcggttaggcttaagctgaaccctatcaaagatgcgatcaaaggcaaaagaattattctaattgacgacagtattgtgcggggaactacatccaaaaagttgctggatctggtgaaagaagccgaaccggccgagattcactttttagtcggttgtccgcctgttatctcgccctgtttctacggcgtcgccatggcaaccaagaaggaacttatcgccgccaattacagtatagaagagatccaagaccaactggagattgatacattggggtacatcaccatcgaatcgttaattgaggccatcggaatgagcaaggatgatctctgtctcgggtgcattaacgaggagtatcccactgagatacccgagggtctggaggccgagacctactacaagccctga

SEQ ID NO: 9374 - DNA, 1248 bp, synthetic construct
  source 1..1248: mol_type = other DNA
atggtggaactgctggcccccgcgggaaacttcatcagccttcgggctgtgctcgagaacggggccgatgcagtctacttcggccttgatgactataatatgagagccaatgctaagaacttctccctgaacgacctgaaagaggtgtcaaagatagctaatgagtacggcgctaaaacttacctgtgtacaaacactatcctgaatgaacgcttggcctgttccctggacaataaactcggggatatcgcctctagcgagatagacgggctcattctatcagacatagggctcattgaaaacaccgtctccaatggcctcgaagcgcacatcagcgtacagcagaacgtgaccaacagctacatgctgaagacacttaagaagctcggtgctaagagagccattctcagccgggagctttctttaagggagatcatggatttggccaagaaaagcccaatcgaaacggaaatttttgtgcacggggctatctgcatggcaatctccggacgatgttttctgagctacggcctgtacggtaggagtgccaattgcggggactgcctgcagccttgccgaaaaaactggacactgacttatgaggagggggacgataacgtgataaacttctctgatgcggaggaggagtcatttattattacctcctccgatgacggaagttaccgcactaactttttctcccctaaagacctgtgcatgatcgaatacatcccggaattgatgaagagcggtgtggcctcatttaaactagaaggaagggcacgtagtcccgattatggtgcaatggtgaccggagtgtacaggcaagctatcgatagttatatcgccgacccactcaactacaaggtgaaggaggagtggatggaagagctggaaaatgtgttcaatcggggattcgacacgaatttctacttcaataccccctttgagatcagtgaggacaatcagagcaagtatatcaagaaggacattggccaagttgtaaactattataacaaagtaaaagcagccgagctgagaatttgggacgatttgaagacaggcgataagatcatcatccagggcaagacgaccggctcgattacccataccatcgactctatgcagatagacggcaagagcgtctcgagcgtgaaaaaaggctccaacgtcgcaattgccattccaacaaaagtccgcgaaaacgacttcgtttacaagttagttgagcggaacgtcgacgattga

SEQ ID NO: 9375 - DNA, 795 bp, synthetic construct
  source 1..795: mol_type = other DNA
atgattaagaagatcgctatctatggaaaaggtggaatcggaaagagtaccactgtagccaacctctcggccgtctgggggagcgataacctgaagtgtattgtgatcgggtgtgaccccaaggcagacacaacacggaccctgcatggctcaagaatcccaacggttgtgcagaccctgaaggataatcggaagccagagagggaggatctagtgttccgcgggttcaaggatattctctgcgtcgaaagcggaggtcccgagcctggtgtgggatgtgccggccgtggcgtgatcgtggccatgaagcgccttgaaaacttaggggttttcgacgaagaattggatgttgtcgtctatgacgtattgggcgacgtggtctgcggcgggtttagtgtgccacttcgcgaaaaatatgctgatgaggtgctgatcgtgacctctggcgagtacatggccctgtacgcggccaacaacattgtgaaaggggttaagaaactgaagggaaatctctccggcatagtctgcaactgccgaaacgtagagaatgaagagcagattgtcaatgactttgcccagaggataggcacacacgtgattggcacgatccacagaagcaacctcatccaggacgctgagctggacgcaaaaaccgtggtggagaaataccctgagtcctctgaggcacaagagtaccgggacctggcgtcaagtataatgagcaatgagaaaatctccactccggagcccatggacgatgaagaatttgaatccttcttcaagagctacctgtga

SEQ ID NO: 9376 - DNA, 480 bp, synthetic construct
  source 1..480: mol_type = other DNA
atgtactacagcactaactacaattccccgatcggcgagatgctctttgtcagcgacggtgaggccgtttgcggaatctggttttgcaatcagaagtacttcaagaacaacatcgacaagacggtgagaaaggacgatctagtaatcttcattaaacttaaaaagtggttcgacgactatttcaacgggttaaatcccaaaatcgattttaaactgaagcctcaaggcagtgagttccgccagaaggtctggaaaattctgtgtgagatcccatatggtgaaaccctgacctatggggatattgcatcaatgatatcccccaacatgagcgcccaggcggtgggcggggctgtgggacataatccaattacaattctgataccctgccaccgggtgctgggagcaaacgggaagctcacaggatacgccggcggcttggataggaaaatcaaactgctgaagctcgaaaagatcctttga

SEQ ID NO: 9377 - DNA, 540 bp, synthetic construct
  source 1..540: mol_type = other DNA
atgaatttaccgctgaatattgttatagggaacgccatatccctcatcgccggcattttcatcctgttcagcatgtgggtgaacgatgagaaggaagtctacaaacaccagttttccaacgccttcattctcaccatcagcagcgcgttctttttctcctggactggcgtggtgacgatggcaatcgccgcgagccgcaatgcaatggtgtataaggaccggcttacctttaactggactatattcttcatcatcgttagcctcacagtcggctgtcttgtaaatacaatgggaatcgtgggactgttgcccattatcgccctggtgcagatcaccctgtccaactactacctgaaaagcatcaaagccattaagatcagtttcattgtcaattcgatcatctatataatttacttctttgcaatatgggactttagtagcgtagctattgagagtgtgaccgtcgctgtggggatgatctcactgttgaggctcatcaacctaaacaagccaattttttgcaacaacgaagtgtcatga

SEQ ID NO: 9378 - DNA, 804 bp, synthetic construct
  source 1..804: mol_type = other DNA
atgcaaagcaacatctccgaagagctggagatgaaattcccacccatcgtgctgatcaagagcaacaccaaaccaaaggatgtgaaggaacctaagccgggcaaagggggatgcgtcatgtccttcgtggcccagacaatcgctaaaaggatcacgacctgttttggtcgggagcacatcagctgcggcggaatctctgtcgggtttgggtggggcgacggattcagggacgaaaatgccatggattttcaagcttcatttctgtcctgcggtgtggatagcgcgccaaacaaggagaagtatctcgaaaagttgagccatatgtctaagccaaccagagaaatgttcgagcacggcgagagaatttactcggactttaaaactgcaaaagagaatataaagtcccgacctgtgtacgactcggaggattacgtgatttttaagggcctcgagaacttgaactatggggagatccctgattctgtaatattcacagtgaatcccatcgagctaactgccttaattcagataaatacctcattccgccttaaagacacgtatattctgacaccgcaggcatcagggtgccaggccattggctgtttcaccttccgggaagacgagtccgacgaccccaaacctgttctgagtcccattgacttcgccggccgcagtaagatgaagcacttcatccccaacaactacctgattgtcagcatgccctggaaacttttcctgaagctcgaagaggtcagcgaaaagagtgttctccagactggaatgtggaaaaagtttatcgattga

SEQ ID NO: 9379 - DNA, 426 bp, synthetic construct
  source 1..426: mol_type = other DNA
atgtttaactccgacgagaacaacacaatcaaagttgtggtcgattacgtaaaggaatgctctgaatacgatctgagcgaagagctgtacaataaaatcgagctcatgcccaaaattgaggagaagatcggcatcacctacgaggccctgtcaataagggtgctatatttggagttcctgaagaactattccatttatgtctacggtgacatcgtggaaaataataaggagacactgaacaagctcgggccgtatcggaagatcgagactaatgtgaacctctacgacgaaaatggccgcatcatcgaaaccgcacagcacgagtttgcggtgaaggatttccttggaatgcatacctttaaggtcagtttcaacaacattaaaagcattgacaagattgacaaaataagaatattcccaacgtga

SEQ ID NO: 9380 - DNA, 543 bp, synthetic construct
  source 1..543: mol_type = other DNA
atgggtgacatcatgataaccttcgaggtcgatagccagcttaatgagaactgtggcattgtgcttcgcaacctcagcttcaactccgagataagtaatagcgaggagtacaagtgcaacgtgtatggcgaatttagtctaaagaaccatgaagactatgataatctcgaactgaagagcatcttctacgatgacgagagcaatattatcaatatcgaacgagactacattaatttagatgggtttctggggagcggaacgtttgacttctgggtctacctcaacaaggacaaactgataaaaacacacaaaattaagatcattccctcaaaattgcgcaggaagatcctcaagagaagtgtatgcaacaacaaaatctccatcgagtcggaaaacctgtccattaacatcaatctgaagaaggactactccgaggtggaaaagcgggaccggaaaaaggaactgatcaaggacatcgatgagaccatcgatgccctgtcaaaaagcgacgagatcattaatttgataaactactatgattga

SEQ ID NO: 9381 - DNA, 183 bp, synthetic construct
  source 1..183: mol_type = other DNA
atggagaagtactacgagtccataatgaaaaatctggaaatctatcggaacattgcaaacttcgtgagcaactttaatatctacggaacgagcgagggcaagtatctgattatcctgtggcagaaaacagtggggctcaagaccgaaaagagtcacaacaaactagccgtccccaagctctga

SEQ ID NO: 9382 - DNA, 858 bp, synthetic construct
  source 1..858: mol_type = other DNA
atgcggaagatcagcatactcgtgctgctgctgatcctcgttggaatgctcattcccaccggattcgccacagactccaacgtcgtgataacctatggggagactacctattcgaatagcaattacaaatcctttgttgacaacttcttcgttaaccaggccaacgtggacatcaacaatgtaggtgttaagaccatcaccgctgaccaggtgaatcaagtgagcagcggaatcacgggcaagtcatataattcaaatcaaatactgtctagcgcacttgttgacctgaatgataatggaaatctgaaggtgagtgtggacaaatccaaaatcaccacaattaccggcgacatgtacatctcagctttgaagagcgcgggcattacaagtgggcacgtgtacgtgacaagtccggtgcaggccacgggtgaaagcgcgcttgcaggaatcatgaatagctatgaggaagtcacggacgtgcagattccagactcggtcaaggaggccgcaaacgatgagatctacacccaggctgaaatcgtgaacaatagcggtgtcaatgccgatgatctctccaatctggtcaatcaggtgaaggatgaggtcagcggcggcaacgtgactaaccatgatgaaattgtaaacattatcaacagtcacgtggagaacaacaacatcaacataacaaataacgacatcgaaaacttagccgattcaatcgagcaagtccagaacgtgcagggggacgtcaactactacaaaactcaggtaaacgagtttctagacgacaactccacaggcgggttcagcttggatggcctgttcgactggattaaatcctttactgatgggatttga

SEQ ID NO: 9383 - DNA, 609 bp, synthetic construct
  source 1..609: mol_type = other DNA
atggtggtaaagcattgcccaaaatgtggaaatgacattgatgacgaggacatcgagttttgcaccgaatgcggtcacaagctgagcaacaaaattatcaaaaacagtagcaaaggtttcttcgacaatttaaacgaaaagacaagcttctcagtgatcatattctcgttcattatttttggcgtcttcctgttcatcgggagcgtggtatggtccagcttcatggccaacgggtcaattgatctggtgacgtatctgctgctcgttatcgtcttttcagtgttcttcgggggcatctttgtcgggtacttcggatgtatggatgagtcctacatcattccgaacttctccatatatttgggaagcatcttttccgtggtgctatgcggcatcggcctgatatttacattcctcatgggagtcatcagcatcctcagtagcatcgctccctttggcagttcaaacagcatatcccagactagcacctccagctacgcccagtcggttgacttgagtttcatctttaagctggtgctctttattctgctgattcctgtggcatcttacattggggtctatcttggctactttcttaagaagaatatctga

SEQ ID NO: 9384 - DNA, 456 bp, synthetic construct
  source 1..456: mol_type = other DNA
atgaaagtgaggaagattctggtcatgctgctaattctcgtgactctcgggttcactctgaatgcagtcgttgcgagcagcccagaccctatcaagctcggagacatcaaaaatgatgacttggtaatcacagaggtcgggcagaacaaactgaacttcgaatactccgtggaagtggacatctcggacttgtccagtgaggataagaagctttttgagaaggccctgaataataacaacacctcatttatccttaacctgacctcttcaaccccgacgaagattgccatcacgatgcacagtctgcccaaaaaggctgagatcataggcaatacactgtatattaaaaataacaacatgtttcgcctgattaacggtatccagctcgataacttaaagataagcgcagtgagcttcaacacaacctccggccaactcttcatagcccggaagtga

SEQ ID NO: 9385 - DNA, 957 bp, synthetic construct
  source 1..957: mol_type = other DNA
atgaatttgggaaagctggtgggaaatactccaatgataaaaattaactatgaatacggcggaaagtcagggagcatatactctaagctcgagttttacaattactccggcagtatcaaagatcgaatcgcactgtatattattgaaacagaaaggaagaacggcaacttgaaggaggggcaagccgtcgtggaagtgacaagcggcaacacggggatcgcatttagcgccatcggtgcgctcttcggtcacgaagttcacattttcatgcccgactgggtgagcctggagagacgcaagctgatccggatgtatggcgcccatgtgcatctcgtctccaaagaggaaggtggattcaagagggctcttgagcttgcggaggaatttgccataaagcacgacgcctacatgccactccagttcgacaacaagttaaacatagaggcccagtacatcaccgggcaggaaatcatcgatgagattccggatatcgacgctttcgtttcaggtattggcaccggcgggaccctgatgggcataggcaaaaagttaaaagagaacaatcctgatttcaaactctatgccctggagcccagcacactgagcatccttaagatgggaatggaggagggaactcacatgatcgaagggattggggatgattttattcctggaattgtggataagaatctgatcgacgatatcgtactaattgacgacttggacgcaattaacatgagtaaacggatcgctaaagagtttggactaggcatcggcatctcttcgggggccaatttcctcgcgggcgtgctgatcaacaccagtgatattaagatagctactgtctttgcagacgacaacaaaaagtacatcaccacgaagctgtccgaggaaatcgacgacgaccccaatctgatctccaataaaatcaagctgatcaacttcgaggtcatttga

SEQ ID NO: 9386 - DNA, 885 bp, synthetic construct
  source 1..885: mol_type = other DNA
atggtgcagtactgtaggaaatgcggaaaagaactggaagacgacgccgagttttgcgatggctgtgggtttaaccttaacaaccatcccaccgaggacaagcaggagttgaataaaaagatcaagcaaaccagccagaaggataaaaacgattttatcaccaaactacccctctcccttgccatcatcagcatcatcgtcgtgattgctgagggcctgggaacccctatgattatgggctgggacaacatcatgctcgcaatcgctataggaatcattgggggcatcattggaataattctgatggagaaaatagacgaaccgctcatcgctagcgttgagttcattgcaacgggcgccctcgtttactcatttattgggcggttcggcgacatatcccttataattttcattatcaccgcaatcctgacgctgtacttcaagggtcacagcgcgaataacaagaagctatggactatccccattttgactatcgtgctgctcttcgtgctgctgatcgcgagtggagccctgtatcagatcaacgccgaaaatagcgtcatcgtagggaatttaagccaaaacatcaccaatgacgggtacggctactataacgggtatgtaacgggagacattaaggtcgatagcagttttgactatctgtgcgtgaatgtgaacttcctggacaacaacggcaaggtcatcgatagcactatcggttggaatgatttgaaccctcagagtggtaagacatacaagatctctgcttggtatttcgaacagcaggccccagagaaagccgagatatccgtggtggactcggcagattccacaacaccactctacacagagaatattaccatttcaacatcatccggcgtgtga

SEQ ID NO: 9387 - DNA, 2724 bp, synthetic construct
  source 1..2724: mol_type = other DNA
atgtcaactcaaagcgaggccgtgctggagaacaatctgataaagagactgagcgaaaatggatatgagtttgttaagatccgaaacgaaaatgacctcttagcaaacttcagagtccagcttgataagctaaacaagtgtaaactcaccgatgaggaatttaacaaggtgctcctgttcctggatgagggctcgatcttcgacaaggccaagaaactgagggatcactattatatcgacaggaaagacaacccattctatattaagtttctgaaccagaaggactggtgtaagaacatctttcaagtaagcaaccagataacgatggagagtaaacacaaaaataggtatgacgtcacgctgctgatcaacgggttcccactcgttcagatagagctgaagcgacgcggtatgcctctgaaagaggcgttcgaccagatcacgaggtacaccttacactcctacaaagggctgttcaattacattcagatattcgtggtcagtaatggcatcaatacaaaatactttgctaacggactgaagaacgacctccaatttgagttcacattttattggaaggatgaaaagaacaacaacatcctgtcactggatgactttgctaataccttcctagagaaatgtaatcttgccaagatgatctcaaagtacatggttctaaatgagtcttccaaacgcctgatgatcctgcgcgcttatcagaagtacgctgtggaggccgtaattcaccaggctctggacattaagcaaaacggctatgtgtggcataccactggttccggcaagactcttacttcctacaaggtcagtcagttgctggcagaagacgaaagcatatacaaagtcattttcgtggttgataggcgggacctggatattcaaacgaataaggaatttaacagtttctgcgacgggtgcgttaacaccacaaaacacaccggtgctctcatcaagaaccttacaacggagggcaaaggtaagcttgtcactaccactattcagaagcttagcaaggcagtcaagacagcgggggacaaagtgaagcttcagaagatcaaggataagaaaatcatcctgatcttcgacgagtgccatcgaagccagttcggcgaaatgcataacgtcatcaccgaatttttctccaattcactcagctttggctttaccggaacgcccatttttgcgaagaacagcgacggaacacgaacaaccaaagacatttttggcaagaaactgcacgaatacgtgataaaggatgccatcgcagataacaatgttttaggcttcagcgtggactatgtagggggggcaaagtcccacaccgatatcgataaggaggtaaaaaagatcaacactaaggagtacttggagtcagacaaccggctgaatcagatcgtcgactacattatcgaaagttacgacagcaaaacgcgcaatcgcgaatttaacgccatgttcacagtgagccgcgggggagtgatacacaattactacgagcttttcaaaaagaagaagcatgacctcaagatagttacaatcttcaccttcaaagccaatgaagatctcagcgagaacgagcactcccaggacctgttggacaaatacatcctggattacaataagatgttcgaaactaatttcacctccgacgactttaaacagtaccatgccgacgtgtctaaaagaatgaagaacagggagatcgacttgctcctcgtggtcgacatgtttctaaccggattcgacagcaagcttctgaataccctgtatgtcgacaaaaacctgcaataccacggcctgctgcaggcctttagcagaaccaatcggattgtgaataagagaaagtcacagggaaacattgtgtgcttcaccaatttgaaggacaacgtggatgaggccatcgcactgttctccgatccgaacgcaatcgaggatattatcctacccccctatgagacattcgtgaagtggttcaacgaggatctcaaacggttattcaaactcgtgaagactgctacagaagccttggaccttcaaagtgaaaacgataagaagaagtttgtactcatcttccgggacctaattagaaacaaaaacaagctcgacattttcactgagtttaattgggatgacgtcaaaatcgatgaacaggagttcaacgattttaagtccgcctacctcgacatttacgacgagtttaagaaggataacgaggacggggaatctgtgctcggcgatatcgatttcgagctggaactgcttaggaacgaccagatcaacgtggattacatattgaacctgctcgcggatttagataagaatagcacctccttcaagcatgataagcagcggatcattagcctcatgaaggaacacgagaatctgcgtagcaagatcgacttgattgagaaattcataaatgagaaactgggcaatattgacagtaaagtgaccaacattaatgaagagtttgataagtttatgaaacatgagcgcaagcaggccatgtgcgaaatcgttgacgaggaaaacctgaacgaggatgtggcccgtcagatcttcgaatattttgagttttcgggaaaaatcgacgaagagctgattaagcagtcgttggtggaaaaattgaaattcaaagagcggaaagctaaggtgaatacaattaaattcaaaatatttgagctgttcgaaaaattcgactattga

SEQ ID NO: 9388 - DNA, 555 bp, synthetic construct
  source 1..555: mol_type = other DNA
atgatagtcaaaaagcttgaggacattgcagaggtgttcagtggcgtacagatatcccggttcatcgacctcaacgagaacaaattccccgtgatcaagaacaagtttgtggaagatgaaattctggattaccactatgaaaacatctctaagaatatcaataagaagtattattcgaagaagggagacattataatctccctgagtcagcctaataccgtcagcctcctgcagaaggagggattcattattccaatgtactttgccatcatccgcctcaacgagggctatgactcctcatttatctaccacttaatgaatagcgatttgttccataacaagctccacgtgctgctggagggggggacgctgagggttatcaaggtggcggatctgaaaaaaatgaagattaatatcccgaacttcgaaaagcagaatgactacggtaaatttctagacctcatcgacaaaaagtgtaaattgcttaactacaaaaagagctgcaacgaaaagatcaaagagtacctgattcaaacacagctgaaaggcgagtga

SEQ ID NO: 9389 - DNA, 1545 bp, synthetic construct
  source 1..1545: mol_type = other DNA
atgagcgattatcagaacaacctggaatccaagctttgggccatcgccgacgaacttaggggaaacatggatgcaaacgagtttaagaattatatcctcgggtttatcttctaccgctatttgtcagagaaattggaactgcacatgaacgaagaacttaaagaagatgagctgagcttcactgaggcttgggatgatgaggaatataaggatgacctgatggatgagggcatttctagcctgggctacttcctcgaaccacaatatctcttttccaccgttattgagaaagccaaggttaatgactttatcttagaggatctaattaaatccttaaattacattagcaatagcagcattggcaccgacagtcaagacgatttttccaatctcttcgaggacgtagatttgaatagcagcaagctgggcaagtcggacgacgacaagaacaagttaatttccaaaatcctgctgaatctaaacgacatcgacttcaaactcggagacgacgagtcagacatactcggggatgcttatgaatacctgataagtcagtttgcctccagtgcagggaaaaaggcaggcgagttttacacgccccaggaggtgtccaagatactcgctaagatcgtcacacttggcaaaaagaagctgagaaacgtgtacgacccgacgtgcggttcagggtcgctgctgttgagggtggccaaagaagtggaggtgggtgatttctgcgggcaggaactcaaccagaccacatacaacctggctagaatgaacatgatcctgcatggtgttaagtacgtggactttgatatcaagcagggagacagcctgaagtatcctcaacacattgacatgaatttcgacgccatcgtggcgaacccccctttctctgcaaaatggagcggggacaaatcattcctggacgacgaaaggttcagcgcctacgggaagctggcccctaaatcaaaggccgattacgccttcgtccagcacatgatttaccacctggaggagaatggaaccatggcgattgtgttgccccatggcgtgcttttccgcggcgcggcagaaggaacaatccgcaaatacctgatcgatgagaagaattacctggacgccgtaataggtcttccagctaatatattctacggaaccagtatccccaccgtgatcctcgtgttcaaaaagtgccgggaggaagaccaggaggtgctcttcatcgatgctagtaacgactttgagaaagtcaaaaaccagaacaagctccgatccgaagacattgagaagatcgtcaacacttatgcgaaccgtgaggagatcgataaatattctcacaaggcaacaattgacgagatccgggaaaacgatttcaatctgaacattccgcggtatgttgatacttttgaggaggaagaaccaatagacctaaatgaggtcgtctctgagctgaagatgatcaacgaggagatgaaaaaggtagacgctgaaatcaagaagtactgtgatgaattgggcatcgaggcccccatttttgattga

SEQ ID NO: 9390 - DNA, 1125 bp, synthetic construct
  source 1..1125: mol_type = other DNA
atgagcgaggagagattggtgcccaagctacgctttagcggcttctctgacgtatgggaatcctataaaattggtgacataagtaaaacttactctggaggcaccccttccaccagcaagagggagtattacgaaggagatattccatttatcaagagcggcgagatttgcaaggataagacggaacactatattaatgaaatcgcaatcaacaactcatccgctaaaaaaatcaagaagggggatttattgctggctctgtacggtgccaccagtggggaggttgccatctcgaaaatcgacggtgcgattaaccaagccgtcttaaagatcgacaataatatggataactacttccagtacaactattttctgaaatataaagacaagatcgtgcacaagtacatccagggcggccaaggcaacctttcagccaacatcattaaaaagttggagtttaagttcccaaagctggacgaacaaaagagaatatcccagttcctgctcctgatggacaagaagatcgatctcctggagaacaagctacagtattaccaggacttcaagaaatacctcatgcagcggatattcacgcaaaacctccgatttgattttgataatgtgaaactcaagaacatcagcaagatcaataaagggaaacagctcaacaaagatgacatggtggaaactggcatttttcatgtcctgaatgggggaaaagagccctccggctacacaaatgcgtggaacacccctgagaacacaattaccattagtgagggtggaaattcgtgcgggtacgtgaacttcaacacagaaaaattctggagcggggggcactgttattatctggacaatctggccgaaaaggtggacggatactacctttatagttacctgaagtttatcgagccaaagataatgcggctgcgcgttggaagcggcctgccgaacattcagaaaggagatatcgagaatatcaaggtcaagatagctcttcccactgagcagcagaggatctccaacctgttgtactcaacagacgaaaagataatcaacattgcaaatcagaaagacaatttcgagcttttcaaaaagggcctgctccagcagatgttcgtgtga

SEQ ID NO: 9391 - DNA, 1161 bp, synthetic construct
  source 1..1161: mol_type = other DNA
atggagtttaccgacaactggcagacgtacaaactgggggacatattgacattttactccacaaatagcttttccagggaaaagctgaactacgaatttggtaacgtgaagaacatacactacggggacattcacaccaagtacccaacgatcgtgagcctacagaataataaggatgttcccttcattaatgaagatatagatctgtctaagttcaacgaggaccagtatctgcaagacggggatctgatcattgtggacgcctcagaagactatgacgatattggcaaggccatcgaggtcatgaatgtcaacgacgaaaagttcctggccggattgcataccattttagctcgcgatgagaagaacataaccgtgaacggattcaaagcagatcttttctccactaacactctcaaaaccaaaatcaaagtaatcgctaatggaatctcggtactcggcatcagtaagaaaaatattagcaaactcgaggtcaagatcccttcgaaacgggaacagcaggagatcgtgagcttcatcaatacgatcgaccggaaaatagagctactggaggaaaaacaccagtactaccaagattttaagaagtatttgatgcagcagatcttcacacagaacttaagattcgacttcgacaaggagtgggagaacatcagacttaaagacttcctgaaatcttctagctcaagtctgagtctgaatgatctggaagagaaccatggcgaatacggcctctacggggcgacaggcattgtgaagctgatcaacttctatgaaaagacagagccttatctgtccattgtgaaggacggtgcaggagtcggccgaatctttctctgcgaaccaaacacttccatcgtgggcaccatgcaataccttactcccaaggagggtgtggatctggagttttcatattaccttctgaacaccattgagtttcgcaagtacgtcgtgggaagcaccatcccccacatttattttaaagactattccaaagagaagctactcgttccgcagatcgaggagcaacaggaaatcgccagtatcctgagcaacattgataacaagctcaatttgatacaggacaggattaatcacatgggccagttcaagaaggggctgctccagcagatgttcgtttga

SEQ ID NO: 9392 - DNA, 996 bp, synthetic construct
  source 1..996: mol_type = other DNA
atgaagaccagaatcatcaacaagatcaagagcaagatgaagctgtacctcgacgagaatcaactggtcatactcgacgagacgcttagaaatatcctgaaagactatgacttggtggagacggagagtgagttcactataaaagaatctaaggaaaactctatcttactgatgaacttcctcgcctctaagcatgtcgaggggtgtagcgagaggaccatcacgtactatcacacaactattgccaagatgctagagagcatttccaagaagatcgaatttatttcaacagacgatctgcggaagtacctggctgactatcgcaaggtaaatggcgcctccaaaaccacagtggataatatcagacgggtcctgtccagtttctttagttggctggaagacgaagattatattcttaagaaccccgtgcgccgaatccacaaaatcaagactaaaaaagtcgtgaaggaggtgttgtccgacgagcacttcgaagtgctccgcgataattgcgacaacattagggatctagccatgattgagctgctggctagcaccggcatccgtgtaggcgaactggtaaaccttaacatcgatgacgtgttatttaatgaacgagagtgcgttgtcttgggtaagggcgattcggaacggatcgtttacttcgatgcaaaaacaaagattcacctgctcaagtacttggagagccgaaaggacaacaatcctgcgctgtttgtgtcattcaaaaaaccatttaaacggctgggaataaacggcgtggagcggagaataagggagcttgggaacggggcgaatattaaaaaggtccatccccataaattccgccgcaccatggccaccaacgcaatcgacaaaggaatgccgatcgaacaggttcagaagctcctcggtcacgtgcagatcgataccacaatgcagtacgcaatggtgaatcagaacaacgtgaaaatagcccacaggaagttcattggatga

SEQ ID NO: 9393 - DNA, 1671 bp, synthetic construct
  source 1..1671: mol_type = other DNA
atggatgccggaaaactgcagctcctctacttcctcagtcagaaccaacagctctcaatcccaatttatcaacggaagtacagttggagcgaaaaagaatgtagtcagctactagaggacatactgcgagttggcgagtccgatgagcagaaccacttcatcggatcgatcgtgtacatgaatcagaaaggccacattgcgtcccctattaatagcctgatgatcatcgacggccagcagcgcgcaacgaccatcacactgttaatctccgctatcgtggagtttttgtttaagaacccaaacgataatgtcatgtctcccgaaaattttatcagttactacctccttaacgatcgggaaaagggagagacccgctacaaactgattctgactcaggacgacaagcggactttgattaagataattgactacctggagactagtgacgaaatcccatttgacagcaatgattctatccggatcaaggagaacttcgagtttttcaagaagaagattaatacggacaacatagaaatcctgttcaatgggttaaacaagcttcttattatttttgtggctctcgagcataacatcgacaacccccagttgatctttgagagcctgaactccacaggactcgaactttctcaggtggacctgattcgcaattacatcctaatggggctcgttcccgaggagcaggagaaattatacaatgatttctggcacgagatagagaccctgttcgagaaaaatgaggggaactttgataagttcattagagactatctgacagtgaagacggataaagtgcctgtattccgaaacatatatagcgactttaaaaagtattcagcacaaatcgacgtgaaggagttggtaaaggatatccacaaatatgccttctacttcaactccattgcctttggcgccgaggagaaccccaagctgaaggaatccctcgactccctgaacagcctgggttatgacgtcactgacccttttatgcttcatttgtatagggactacaaggaaaacaagctgtccaccgacgatttctgcgaaatcattaaatataccgaaagttacttgctgagacgactcatctgcagcatcccaacacccagccttaacaaaacctttgccggaatgtacgtgcaaattgacaacaccagccatctgagctcatacaaagcgatactccgttcaaaagagaattaccaacggatgccgagcaatagggagttcgtcgccaattttagacagagggacatctacaacctccgcagcaaaaatagggattacatattcgataagttcgaaaattggggctccaaggaaaagacgaacattcagaactacactatcgaacacatcatgcctcaaaaccccaatctgagccaggactggaagctagagctgggcgaacagtgggcagatatccagaagacctatttgcacacaatagggaacctgaccctgacagggtataactcggagcttagcgacaggtcattcaatgaaaaaagagatatggccggcggtttcaaggattcggctattagactgaatatctatctccaggatctgaacaactggaacgaaaatgagattaagctgcgcacaaaccggttcgtcgagaaagctaaaaccatctggccatatccgtga

SEQ ID NO: 9394 - DNA, 825 bp, synthetic construct
  source 1..825: mol_type = other DNA
atggtacgattcagccagacactcgacgacaagcaatcaaagaacagggaaaaatcctataggcaggtgatggagaacccctaccatgcatctgagaaccggcagtcctacagtgcccaaaacgaggacagattttatagccaaccgtctgtgcagcgctccaactaccatgaggacaactttcacagtcagaaagacgaggtcatatacgaaatgtctgtgatcgagaaggaaagcgtcaaacccgattacagcaagccagagctgaagttccctgccgaccagaacatccagtttggcgtggagtatgcaccaaactccaagcccccagtgatcggtcgcaattacacgatacggtcaaattccatcatctacaacgacgtggtaatcggggacaacttccggaccggccacaacgtggtgattcgagaaaacaccaatatcggggacgatgtgcttatcggaaccaacactgttattgaaggggacgtgattattggcaatgatgtgagtatccagtcaaatgtctacattcccacgaatagcgtcatcgaagataatgtcttcatcggaccttgtgcgtgctttacaaacgataagtatcctgttagaatcaactatgagctgcagggccctaaggtgaggagaggggcgtcgattggaggcaatactaccttcctgagcaatgtcgaggtcggggaaggttcgatagttgccgctggcgctatcgtaatacacagcgttccaccattctacttggccattggaacacctgcccgcattaagcccctaccggatcacctcaaagtgcccaataaattctga

SEQ ID NO: 9395 - DNA, 162 bp, synthetic construct
  source 1..162: mol_type = other DNA
atggccaagtacaaatgtaagatttgcggctatatcttcgatgaggacaatatagaagagggactgaacatcccggaaggcaccaagttcgaggacctccctagctccttcaaatgccccaagtgcgggatgccaaaaagcatgtttatgaagatggactga

SEQ ID NO: 9396 - DNA, 120 bp, synthetic construct
  source 1..120: mol_type = other DNA
atggccaagtttaaatgcaagatctgcgggtacgtgacagaggagttcgaagaactgcccgaagatttcaaatgtccaatgtgcggcgcaaccgcggacatgttcgagaagatagagtga

SEQ ID NO: 9397 - DNA, 111 bp, synthetic construct
  source 1..111: mol_type = other DNA
atggcatttatatgcaaggtatgcaacttcgtgctggaggaggatgaactccccgaggactacatctgtccagtctgcggcgtgggggccgagcacttcgaagaacagtga

SEQ ID NO: 9398 - DNA, 600 bp, synthetic construct
  source 1..600: mol_type = other DNA
atgaagacgatcaagaacgccattcaaagcgaaatcaatgtgaagaaatcccagtttatctgtagcctcgtgccaaccgagactaaggccgaatcaaaggccgtgattcagaagttcagggagcagtacagtgacgcaacacataattgcaccgcctatattgtctctgacggagaaggcttcgatgatgacggcgaaccgggcgggactgcggggaaacccatgatcaacgtgctgcgcaaaaacgagctgcacaacgtaaccgcgattgttacacggtactttggaggaatcaagcttggtgccggcggcctggtgagagcatactccaagtccgtaatggaggctgttggggaggctgaaatcctagagattgaagagtatgacgtgtataagctgatcttcgaatacagcaatatccggatagtcgacagcgaggtgcgaaacaacaatctggaggtcatcaacaaggagtacagtgataaagtcagctatgacatcgtgtcaaaggacggtagggatattttgaaaatatttgagaaatactcgggaaaaataaacaccgggttcaagaataagcagttcctcgagaacaaatga

SEQ ID NO: 9399 - DNA, 420 bp, synthetic construct
  source 1..420: mol_type = other DNA
gtgatcttcctgccaggcagtaagagcgctacatttctcgtcattttcatagtggccatcgtagccttctgcattgcatgcgtctgtgccagcatgacaggacagatttcgatcctacccaacgacaacgaatccgagagtatcctggataacctgtccgcgatcaccaatgacaccggaaacagcggacagagttacggttctaaggattatagctcaagcagctccagtagctcgtccaatgatgactcccaagtggagactaccactgaccactcaggcgacaatcagggggactcccagaaggacagcgatgatcacgaccacgaaaatagcaaccagaataacaaagacaaggatacgaaaaccgattctgggcatgcagggcaaggctcaggcgacgctaacgattttgactga

SEQ ID NO: 9400 - DNA, 693 bp, synthetic construct
  source 1..693: mol_type = other DNA
atggctgagctccggtacagagcaggaaacatacgaaaccccgaggtgcacaagatcggaatcatagcactgggctcacacctagaaaaccacggtcccgccctcccaatcgatactgacgcgaaaattggagcgcacatcgcattccagtcgagcctgcagactggagctaaatttctcggcatcatatttccagcttatgaactggataccattgaccatggcgtgcacgtgagtctggagacattgaaagaaaatgttattaggacacttaacgacgccaagaaattcctggatatcgaaaaggtcgtcattgtgaactcccatggtggcaacattcctctgatgagtgagttatgggatatcgaggacaaaaccgacatgattgtcgtattcaacaataaggtaatctcctccgagggcccccatggaggcagcggtgagttgtcaatggccaaggtgctcgggatcgtgaacgaaaacgaactggacaatcaaaccaatgttaatgaatatgaggaggtggggctttacgggtttaagcaggcccggcgcgacgacccgaacatcgaggagggggcccgcgatgtcgaggagaatggggtgtacatcgacgaggaatacggcgaaaggctattcacgctggccattagcagcgtcctctttgatgtggagaagctgctggacttctga

SEQ ID NO: 9401 - DNA, 483 bp, synthetic construct
  source 1..483: mol_type = other DNA
atggtggtgaaagttaagaagcggaacttcttgaagaaaaagaaaatcaaggaaatcaaggcggaactcggggagtacggaaacctgcttcagggcaagaagaatgtggagatactggaggccgagcccaacagcttcatcctcgtcgatggggaaccatacattatattgattgatgaaaggcccttcccaactttaaaagcagctctggacaatgagatcgatgcgaaaacggtgaccgtcgacatgggcgccatcagatttgtagccaacggtgccgacattatgtcccctggaatcgtggctgcttcagagggtgtgaaagagggcgacgtcgtgctgatcattgacgaaacacatggcaagccgctggccatcggggtaagtctgctcagcggggaggagatggtccgcaacgatagcggaaaggcagttgaaaccaaacactatgtgggcgacgacatttggaattttgagctatga

SEQ ID NO: 9402 - DNA, 498 bp, synthetic construct
  source 1..498: mol_type = other DNA
atgaacttcaaccgggaaaagtatatcgacctgataatgtacatcctcttgaagtgctactcaaagcccaatctggggaagaccgtactctgcggcatcctgtactttattgacctcaactactatgaagtctatggaaaattcctgacttgtgagacctacatcaaatccaaaaaaggtattgagccgaagcacttcaaggaagtgacagaggagttaatcgctacagacaagctgtttctaaggagggaggcatattacaacagaatcattcaccgctactaccttacgataatcccccagtttaaattcagcaaaaaggaacttgagatcatcgacgccagcatcaagcgactgaaggataataatgcatccagcattacccggtatgcgataaaagaccctccattgcatattgctaatttcggcgaggatatcgattacaagtatgtgttctcgcgcaacagtgcctactctgccattaagaactttctgtga

SEQ ID NO: 9403 - DNA, 231 bp, synthetic construct
  source 1..231: mol_type = other DNA
atgagcggccagaatgtgcaacggccgctggacgccctgggaaaaagcgtggatgcgcccgtgttgataaagctcaaaggagatcgagagttccgcggcatcctgaagtcctttgacctgcacatgaacctggtcctaaacgatgcagaagagctccaggacggggaagttaccaggagactcggggtcgtgcttattcggggcgacaacatcgtatacatcagtccatga

SEQ ID NO: 9404 - DNA, 189 bp, synthetic construct
  source 1..189: mol_type = other DNA
atgagcaagggcactccctcaatgggtaagaagaataagaagacccacatacgctgcaggagatgcgggcggaacacataccatatccggaaaaaagtgtgtgccagttgcggattcggcaagagcaaaaaactgcgaagatattcctggcagaacaaaaagccaaccacgaggcagcgcctcgtctga

SEQ ID NO: 9405 - DNA, 1392 bp, synthetic construct
  source 1..1392: mol_type = other DNA
atgaagtacgataagagtctcatcgtgcttttcatcatacaaatttgcgagggctttagtttttacgggctgggcgccatactgacccttttcatgacgcagtttttgaacctgagcctgtcatttgcctttttagtgtatgggacctactttgggctggtttatattgcaaccctgtttggaggctatctctccgacaaatacatacgtagccggtgccttatcaatgcgggcataatcctgatggggcttggtttcattgtcctgagctatttcgcctcatgggccaaccccctggtgcagacacactcttacttctattttaatacgcccgaaatcatgctgatcattagcctgatgagcatcattttgggggagggcctactccgggtaaacatctcctccacggtaaaacaggtgtacgaggataacgagaagaaagtggaatcggcattcaccctcctgataatggcactcaacattggagctgtgtccagcgccatcatcctgggcctgacaattggtgagggaaaccttagtctctacaagtacggcttcttaatactggctgtgagcctgttcattggcatcatcatttataatctcttccggaataaatatctcgtcaacagcaaaggagagatcgtgggaattaagccgtcaatcaagctggaatctgtaatggacaacgcggaggagaagctgaccaagcaggagagaaaccacgtgaaggctattatcattatcctttccatctctttaattttcttcatcgggtttgaagtcatcgactcatccctcatgtttttcgccaaagattacgttgcaaataccattccttttgtcccattcaggatcagtcctgaaatcatcaaatttatcgagccctttggtgtgattatcttctcaccattcatcctaacatactttaatctcaaggacggggacgaaaatgagtctctcatctttcgcatcatgctgggcattattgtgctgctggttacttacgctgtcttcttcatcccttgcatgatggtcgacaacaacatgaccgatgtctccatcattttcattatcatcatggagctaatcagatccacttcggaaatactgatactgcccatagggttgagtattgtctcgaaactgagcccagccaagtacttgagccgattgctcggcctcttctattgtagcctggccggagcgtacgtggtgtccggatacatggcaggcttctatccgaatgccgaaagtatggctcataagttgtttggtcttatacagatcaacgatttcaagatcttcgccagcgttttcatcgtgatgtacctgacattgtttacagctacttatatttctcgcaacaaaattagggacctaatggagtga

SEQ ID NO: 9406 - DNA, 999 bp, synthetic construct
  source 1..999: mol_type = other DNA
atgaataaccccaacatcatcctaaagatgatctttatgaagaagatgaagggagtcctgctcgaagccagtgccattgacaagggcgacatttcatgggaggagctgtccgagcatgtcgatctaacaatttacgagaacacaactgaacgcaacaagttcgaacatatcggcgacgccgaagtcatattcgacaacaaggtgatcattgatgaggaggtcttccggaagtgtccaaatatcaaatacgtgggcgtttgtgctacgggctataacgtggtcgacatgactgcggcccggaaaagaaacatcaccgtgacgaacgtccctgcttactcgacggacagcgtggtgcaacttacctgggcgctcatcctggagcagacctgcaatcttgaactccacaaccagtccgtgaagaatggtgactggataaattccgagatattctgctactggctcaagcccattagcgagctgtcaggtaagaccctgggcattatcgggtatggaaacattgggaagaaagtggccaccatagctaaaagctttggcatgaacataattgtaaacacagaccaccctgaaaaatacagcgaggagaacatcaattttgtagataaagatgagatctttgccaagtccgacattatcacactgcactgcccactgacagaagataccaaagacatcattcgcaaggaaaacattgacaaaatgaaaaacggcgtgcggatcgtgaacgttagccgtggagggctggtcagggaaaatgatttagctgacgcactgaatagtgggaaagtgttgagcgcaggggttgatgtggttgtcaccgaaccaatgagtgaggataatcccctcttggacgccgagaacatcataatcactccgcacatcggatgggcaagcatcgatgcacgaaagaggctggtagacgagattatcaagaattataaggccttcatcaacaatgagaaaagaaacgtggtgaattga

SEQ ID NO: 9407 - DNA, 915 bp, synthetic construct
  source 1..915: mol_type = other DNA
atgagcaaggagaacatagagaaaaatgagattaacaactcgaatgcgccaatcctgtataagaggcacgaagactacatcccccgggtcgctgcaatacacgatctctgcggctacgggaaatgcagcctgggcgtagccattcccgtcctgtcagcagccggctgtgatgtgtgcccagtcccgactggattgttcagcaatcataccggatatccgacatggtacatgcacgacaccacagagatccttaacgactatttgaatacctggaaggagatcgacatcgacatagatgctgtgtattccgggtttttaggctccgatgaacaggtggaagtgatcaaaagcgtttacgaaacctacccccacgccctcaaggtggtagatcctgtcatggccgaccatggacaagtctaccccacgtatgacgatgatctgtgtcaagccatggcaagtctggcctgcgaagctgacattctcactccaaatcttaccgaagctgcgattattctgggggagcctatcggtgagaaatggagaggggccaacattgatgatgaggaagcgcaccgcattctaaacgctctgctcgaccatggagccaagtacgtggtcctcaaggggatacagcgggaagatggaatcatccgcaacttcgtgggtggaaaggacatggacatcagcgaggcctccaacgagtttcttccctacatgctgcatggcactggggacctgtacgcaagttccctgctggccgctgtgatggttggcaaagacctatttgagtctgttgagtttgcaggcaatatcacgcacgatgccatgatcgtgtcaagtaagcagcctaacttccaggaccgaggcgtgaacttcgagtctctgctcggtcaggtgacagacttgttcatctga

SEQ ID NO: 9408 - DNA, 840 bp, synthetic construct
  source 1..840: mol_type = other DNA
atgatgaggaaagtgacccacaaaaccaagggccagaaggccattgacggcgccggagtgcatctggtgcgcgtcttgggcaacactacaaccgatgtgcacgacccgttcctgatgttggatgcctttgactcaacgaatcctgacgattacacggcaggctttcccatgcaccctcacaggggcatcgagacaattaccttcgtcagcaagggacaaatgctccatcaggaccatttgggcaccgaagcactggtcggagacggggaagctcaatggctgactgcggggtctggggctgagcacgccgagtttcccgggggagaacgcatgcttggcacacagctctggcttaatcttccagcaaaggataagatcaccgctcctcccgcatatcacagtataactacagacgagattaaggaattttccctcgatggtggctttctgcggctaatggctggggagtataatggtgaggagggttggcagggcaaatacctgcccgttgacttctatgacatccatctagaacccaacaccaaagtggagattccagtaaaggagggacggtccgccttcgtgttcacactgctcggcgacgtcgtgatcagcggggatgttgtgctggaaaagaccgccgccaagctctcggatggtgaccacgtaatattcgaaactaaagacaacagcgccgaaatcttactgtacagttccaagcgactggatgagccggtggcgtgggccggaccaatcgtcatgaacacaagagaggaactcaaccaggctttcgaggatctggccaacgggacgttcatcaaaaaacaggcggagtactga

SEQ ID NO: 9409 - DNA, 408 bp, synthetic construct
  source 1..408: mol_type = other DNA
atggtggaactgaaagacatagcccaagagaacgaagtggatctcgagaactgtgtcgtgtttgtaagaggcgaagacgacatcctagctgttgacgtgagcaatgctaagatcaggcagcgcagtgacgacaccatgggcttcaccttttcaattacacccgagcagacgctgaaatttgaagagtattttaataagttcgcaaacggggaaaaattctacttcgatatttcccagactggataccggccggcctactaccgaggtctgtctcagatcaacaaggaggtctccgaggagtatgacacaaagttcaatgtgaccctcttcgcccagaaggccatcgtcgagcctgatgatagctattttgcaccaacttgcgcgtgctgccaattctgtcacctttga

SEQ ID NO: 9410 - DNA, 453 bp, synthetic construct
  source 1..453: mol_type = other DNA
atgattcacattttgcaccagctggtgctggttgccaatagcgtcatttacaagggcgacataatgttcgattccccattctccaactacatcgtgcttactcgcaataaaacaaatgaaagcatcaaactcgaccagcggcgcgtgaaactcagagagaacaagaacggcctgatggcattaagttatattggcccgctcttcgagatcatggatctggaagacttttttgatgacatgatcagctcagaaaaactgtcgatggacatcagtgagaccggggagtttcgagtaagctttaggggaatcatagacgggaagggaaaaaacttccctcagaaccttgaccataagatcatcctgctacaggaacccacgtgcctggatgagcgggtcaatattcaagaaaccggtttctcaaagttcaagttgaagaacgaggtgtccgagtga

SEQ ID NO: 9411 - DNA, 405 bp, synthetic construct
  source 1..405: mol_type = other DNA
atgctctcccagtttatctatatgttcattaagaccaaattaaagatcaagactaggatcttggtcaacatgattataaactggcaagaggaaatcacgcggattgaccccgagatgaagttccgggccgagggcgggtggctgaagacaatcgaaaaactcgacaagagcgtgaagaacggatacagcctagtgggggactttgtgaaagccggcgactttgaggagaactacgacgagggcatatatctggattgcaataaggaaaagacaggaagaaaaacccagcaggactaccgcctgttcaggttccgagatggtaaagtccgccttctcgatatggtaatcgatggcgaaaatgggtgggcagttgacctgtgggacgctgtggaagatgagctgtga

SEQ ID NO: 9412 - DNA, 672 bp, synthetic construct
  source 1..672: mol_type = other DNA
atgaacctgtacgagaagttcgggatcaagacggacaacaaggtgctgtacgacaccgcatttacccatggctcatactcgaccaagcacgacctgaagtataactacgagcgcttggagtttctgggggatagcgtgctgagtgtcattgtttctgagtatctctacgagaaatacccccactatgaggaaggcaagctgaccaaattaagggccaactatgtgtgccaattcgcactcatctactacagccacgagttgggtcttgataagtatctaaaagtcgctgcgaaggagtccaacctcactaaaaatgagatcctttccatcactgctgatatcttcgagagctttctgggagccatgtttctggaccagggctggtattttgtcaagcggtttgtgagtaattcaatattcaagttcatcgacgccaacgttatattcttcgccgattataagagcgctatgaaagaatacggggacgccaaagacctcgaggtctcctacaaaattctgaaagaatgtggtgtgccacataacaagacattcatcacagcaatcctaattgatggagaagagatgggcgtgggaaagggcaagaataagaaggaagctgaacaggcagccgccaaagtagcgattgaaaaactcaatattaaagtgttctga

SEQ ID NO: 9413 - DNA, 1467 bp, synthetic construct
  source 1..1467: mol_type = other DNA
atgaacaaggagagcgtgggaattgttgagacggagtatcacgacatctccaacccgatcatattagacagtggagaaactctggacgaagtcaccgtggcgtatgagacctatggtgaactcaataaagagaagtctaacgctattctgatttgccatgcactgacaggggatgctcacgctgccggctggcacgaaggggacaaaaagcctggctggtgggagatggtgatcggtcccgggaaggccctggacagcgagaagtacttcataatctgctctaacgtcttgggaggatgtaagggaacaactggtccaagttctattagccccaaaactggcaaagaatacggcgtggacttcccagtcattacaatcaatgatatggttaaggtccagaaggagctaatagactctttcggcatcagccagctggccgcagtgatcggcggaagcatgggggggatgcaggttctggagtggatggtctcttaccctcgaatgatgaaaaaggccattgcaatcgcaaccgccggcaggtcctcgcctcagcagatcgccttcaacaccgtaggccggcaggcgatattttcagactcgaagtggaacaacggcaattattatgatacctgcgagatcccaagtaatggactgtccctcgcccgtatgatcgcgcacattacttacctcagcgatgagtcaatggacattaagtttgggcgcggcttgcaagacaaggatgaaatcagctacgacttctcggtcgatttccaagtggaaagttacctgaagcaccaaggggaaacctttgtcaagcggtttgacgctaacagctacctattcattacgaaggctgttgacctgttcgacctttcagctaatgattccctcattgacggatttaagaacgttgaggccaagatcaaaattattagcgtggatacggactggttatatcccaccgagcagagtatggaattggtaaccgctctgaatgccaatgatgtggacgtgtcattttccgagatcaaatctaactacggtcatgacgccttcctccttgagagaggccagctgaactacatcttctccaacttcctgagcgagaacgtggtggatgacctgatgatagaggatatcgccacaatcagggaaaacgccgacatagtggaggcggccaaactgatgctagataaacacctcacgcatattcccgtggtaactgatgattgtaaacttattggcatcgtgaccagctgggacttgtccaaatccatcgccaccaactccaatcatctgaaggacatcatgacaaagaaagtcaaatactgccacgcaaatgatagcatagaggaaatcgcaagaaagatgcgcaaatttgatatctcatgtctcccggtagtggatgaagagatgaaggtgctggggcttatcacaacagaccagatctccaatctgctcagttga

SEQ ID NO: 9414 - DNA, 624 bp, synthetic construct
  source 1..624: mol_type = other DNA
atggggatcgggtatgctgcgattgccatcaaggccggcatgactccattgcagacaatctctatgtctgtgctggtatacgccggtgcgggccagttcattgctgcgtcaatgatactcagcagtgcaagtgtgctggcaatcgtccttacgaacttcgtggtgaatctgcggtattttgtcatgtcgacctgcgtgctaaatcaaatcgaggactccaacttacctctgaatgtcctggccgctcacacgactgtggatgaaagcttcgccgtgttttcactgtccgaggacagcagcatctgggtctacctcggcattgcagtgacagcatggctgagttggatactgggagctgcaattggggttgtcgtcctggaccttctcccggtgatagtgaccaactcctttaacatctccctgtatgccctcttcgtagccatcctgacccccgctatcaaggaaaacaaacagatcgccatcttggttgcaataacagctgtgctgaatatcattttgagccagttcttaggaaactggagcctaattgtatcaacccttgttggtgccgccattggcatgtacatcgtggatgatgagtacctcctctccggagacgcctga

SEQ ID NO: 9415 - DNA, 315 bp, synthetic construct
  source 1..315: mol_type = other DNA
atggattacatgatgctggtgatcgtgggttgtactctggtcacctttatcccacggctaattccagccctgttcattgacaagctgaatttcagccccaagtttgagaaattcctcgacttaatcccctacacggcgctggccgcccttatatgccctggcgtcttgacagtagacaaccagctctggtatatcgggctcatcggcgctgtggttgccgcatgcctggcttggaagaaagcacccatgggagccattgtgattatcaccgttgtggtgcttatcgcggtgtacagcatagtcccgtttttctga

SEQ ID NO: 9416 - DNA, 237 bp, synthetic construct
  source 1..237: mol_type = other DNA
atgaggaccatgatcaagtatctgcggcaggagctcaagatgagccaaaaagaactgggcaacaaagtgggagtaacaagacagaccataaatgcactagagaacggccgctacaatcccagcctgttccttgcctacgatatcacgcaggtgttcaacaaaatgctctttaagggggacaaggaacagtacttcgtcatggaggacatcttcatttttgatgaggactattactga

SEQ ID NO: 9417 - DNA, 732 bp, synthetic construct
  source 1..732: mol_type = other DNA
atgatcctggatatatacaaagacgcattcgaatattcggctaaggactggaagactttgctgatattgggggtgatctgtcttttcagctttcttctgatccctgtctttctgcttgcaggttataactatagggtggttggtacggctgtgcggggaatcatcaacggcaaagatccactccccgagttcgacgatctgattggaatgttcattgacggcatcaaagtggtcatcgtgcaaattgtgtaccttatcgtccccgccgtgacctttatcgtattcgtgctcatcgccaaccatctaagcggtgttctagccagcgctgtagtactgctggggtgcctggtgaccctgattctgggcattatcgcctgtctcatgattcagatgggcatatgccacatggcatacaatgacggggcgtttacgaaggcattcgcggccgaggagatcaaggctgtcattaacgaaatcggactcttcaagtgcctcttgacttacgtgggcataatcattatatgcgtcgtgttcggagtggtggttacagggattgtcggaatcatatttaccatcttcggtctctcaggagccatgttgggggttgatgccgggggcatcctggtgttagggacactcgtcaattccctgattaccacatttgtggtcggcccgtacctgagtatcttcactggccgctccattggcctgttatacaccatgcagatctga

SEQ ID NO: 9418 - DNA, 825 bp, synthetic construct
  source 1..825: mol_type = other DNA
atgaccagtatcacagactgcgtggtggaggggctgaaatacccattcaatgatctgaaaaaggtgctcagctttggtgtgctcttcgccttgattaacttaatatcattggacattactaccaagtttatcgacgcggtaataaaatatagcaagctgtaccctagcgccagtaacgtgttccatctctcacagctgcccgccaacgatatttacatgatcatcgctttgctgatcattagttttatcatcgtattgtttataaacggatacgaatggaacatcgttcgcttctccattgacaaaaaggaggacctgcccgagtttagcaacgtcctaaagatgtttgtcaacggcgtgaaatatttcctggtcaatgtggcatacaatattattccgattgtcctccttatcattggcctggcccttttcaatgagtcctactccccaatcatcatactgattagcgttctgcttttcctcattgcttattttatcttaatcatggccctcaataatatggtggcacacgattcgatcaagaaggcgtttgacctgcgggaaatcactaagaacattagcaacctcgggtggggcaaatacataggaatcatcgttttcacgctgattgtatatcttgtgattatggtggctgtcggcgtgatcctgttctttataacagttttcatcatcagcgccatcaccgatcagtccatgattatctccattttcctggcaataatcgaggggctgttcatactaccctacgtggaaatcttcttcagcagggtctttggaagcatctatagagaatcaatcaagtga

SEQ ID NO: 9419 - DNA, 633 bp, synthetic construct
  source 1..633: mol_type = other DNA
atggacgtgtttcagcaccccatttttctcctgggggagctgatgaacattaacgtagaactcttctaccttttcaatcatgcattccagaatccattctttgattacataatgccggtgttcacccacttcggcggatttaaattcctaatattggtgttgatcgccattgtgctgtacgcccatttacgaaacaagcgcacactccggaagatcattttccttacgctgatcgccttgctgttttccgacgggatcgctttcgtcctgaagcatctaattcacgaacccaggcctttcctcagtcttgataacgtccacctgctgatcgcggaggacgatccactgagctttccttcaggccacaccacttccacaattgccatagtcaccttcctggtattcaacatgaaagaactggcgaagaagcactacaaaatcatcaatgtgtgcctcatcatctttgccatcctcattccatttagcagaatgtatatcggagttcattatcccggggacgtgttagctggcgccgcaatcggcatagtcggtgcagtgatcgttaaccactttaaatgtgagatcctgaaccggattgacatactgaataagattaaggagtcgatcagctga

SEQ ID NO: 9420 - DNA, 276 bp, synthetic construct
  source 1..276: mol_type = other DNA
atgaacaacttcgagaaccagaagttctgccagtcctgtgcaatgccgctcgaaagcagcgatttctttggaacgaatgccgatggcagtaaaaatgaagactattgcatctactgttttaaggacggcgagtttacaagcgacatgtcaatggatgagatgatgaacttctgcattgacaagatgaccgaagtgcaccccgacatcgacaaacagcaagcgaccgctatgatgggggagatattcccaaaactgaagcggtgggccgacgattga

SEQ ID NO: 9421 - DNA, 1446 bp, synthetic construct
  source 1..1446: mol_type = other DNA
atgtgctcaatcgttggactccagggcaatgttaaggccgaggacattctgaagatgttaaaggtcagcaaaagtaggggtcccgatagcagcggcatctatctggacaagctgtataaaaatattaatctagatgagtttgaagacgataacacttacccaattgcgtttggccataacctgctgtccatttacgatctgaataaccgcatatccaagctgcagcccgtgacggatgacaacctggtgctcttgttcaacggcgagatttataattttaagacaattacaaacttactttctaaggtgggcgtggagaaagaaatcctctctgacgccgaggctctgctgtatttaatcgatttttacaataagggagacctggtgaaagctattcagaacacgacccgcctgttcgacggggactacgcctttgccgtcttcgacggtgaaaacctggccctcgtacgagatcctctcggagtaaagccattgttctatggggagaacgacaaactcaagggattcgcaagctcaaagcagagcctcaaagaggtcggcatcaccgacattaatacactcaagccggagcatatcctttttaacggccaggacataagcccagctcaagcagtgcacgagaaagtctttgagggggacgtagccaaaatcgagaagatgttgagactgagtgttctcaaacgggtggaggatataaacgagattggggtgatcttctcaggtgggctcgactccagctacctggccttgctgctcaaagagatatccgagaatgttcccctgaaaatcaaactttacgctgtgggggtaaaagggtcgaaggatgtggaagcagccgtctacgcttctaaattcttgaacctcgatctggaaatctgcgaagtcaccgaaaaactaatccttgaagcactgcccagtgtcgtgaaggcaatcggcgacgataacctcatgaaagttggtgtgggacttacaacttacttcgcaaccaaaatggtggcctgcgatggtgtcaaggtggctgtgtccgggcaaggcgccgacgagctattcggcgggtataagagatacctgcagagtttcgtggacggaaccctaaactacgacctgagggaagatatgtcaaatatgtatcacgtgaatcttgagcgagacgatgcgtgttccatgcttaacggcgttgagttgcggctgccgtttctggacaagaccctggtggaactggtcctgaacatccctgacaataagaagatcgtgagcatgcacgacgatatgaggaagtcgatcctgcggaagttggctttcgaaggaggcctggattacgaaatcgcctaccgccctaagaaagcggcccagtatggaactggcatcgacaagattctcagaaagaagatcataaaggacatggatatttctcagttcttatga

SEQ ID NO: 9422 - DNA, 216 bp, synthetic construct
  source 1..216: mol_type = other DNA
atgacaatcgagaaagatgcagaagacatcatagaaaagttctccaaaattctcgaagatatcccagacagcgacgagacctggtacattacggataatctaaacctgacccgcgacgataaaagccaggagaagaaccccgagaagatcctgaggaacgcccggatcgacaaggagggcaacctgattgtgaagaaagcggactggactaattga

SEQ ID NO: 9423 - DNA, 486 bp, synthetic construct
  source 1..486: mol_type = other DNA
atgaggataaacttggtcctcgaacttctcgatgctcccgggcagttagtgaaggcgctggaaccgatcagcacttacggggctaacctggtaactatcatccacaagcgggactacaagaacgacaatggcatggttccagtgcagctgacgatagaaggagaacgaaatgatctgaagaatgtcgtcgacaagtatgaggagctgggattcaccatcattgagatggacggcgttgtgaagaaggaaaaaatcaccacaatcctgttcggccatattgtggaccaggacctccgcgataccatggacaaaattaaccagatcgatggtgtgattatcgtagcattcgacattaaactaaatggggaggaaaaaagcacagccctcatcaacatcgaggccgatgtgggccttaagcaaaacgtctttgatagaattgccgagatagcagaggagaaagagttgctggtgatcaacgaggtgtga

SEQ ID NO: 9424 - DNA, 1020 bp, synthetic construct
  source 1..1020: mol_type = other DNA
atggatgagtgcaaggtcatcatcatgggattcgggagcgtggggcagggtgtggcgaaggctatctccatgaagaaggatctgattaaggataaaaccggagtggacataaaagtggttgctgccgccgactcatcgagttcggcaatctcacaagagggattagatgaagaactgcttgtaaagacaaagaaggaggaagggaaactcagcgcatatcctgagttcgggagcgacaagaacggggccgacattctggacgctgtggaatacgactgcctaatcgaggccactcccaccaacatcgtggacgccgaaccggcacttagcctaaccttcaaggcattcgaacagggcaaagatgtcgtcaccagcaataagggccacttggctctcaagtttagggaggtggtggaagccgccgagaaggcgggggttgagtttaaatatgaggcgacggttggcgggtccatgcccataatcaactttacaaaggagaccttggcaagctgtgaaatcaagtccattaagggcatcttgaatggtaccaccaactatatactgtcacggatgacctccgaaggcagcgaatacgaggtgattctgaaagagtcccaagagctgggaatagctgaaacagacccaacacaggacgtggagggtatcgacgccgcctgcaaaactgtcattcttgctaattctctcctgggcatcgatgctacgtacagtgacgtgaaggtcgaaggtatttcaaaaatcaacagccaggcgattgagctcgccaaaaaagacgattacctgatcaagctgatagctgaggtgagccccgataatctccaggtctccccaagactggtgaaacgcggaagttcctacgacgtcagtggcacgctcaacatggccacaattaagacagacttagccaacgaggtaagcgtaatcggactgggcgccggcagcctcgagactgccagcgcaatgctgactgatctgattagtatcctgaaaaataagatctga

SEQ ID NO: 9425 - DNA, 1212 bp, synthetic construct
  source 1..1212: mol_type = other DNA
atgaagtacgtaatatttatcccagacggttcatcggaccttccactagacgaaattaatggtcagactcccctgaaggtggctaacactcccaacattgacaagctggccaaagcgggttatggcggcctcaccaacaacgtccccgagggttatactccagggagcgatgttgctaacatgagcatcttcggatacaaccctgccgactattataccgggagggggcctctggaagccggcagcgtgggcatcgagaccacaccctgcgatgtgatatttagatgcaacactatctttgagaaaaatgggaaaatggaagatttcaatgcaggccacatcacaacagaggaggccgatgtcctgatgaaaggattgaaccgatacttcaatgataagtatcccggattcaaggggaagttttacacgggcatcagttaccgccatctcttcgtatattcctgtgataacgtggaggatgccgaaattttagccaacttaaagacaatgccgcctcacgacatttcaggggagaacctcgttgacaatttgttcggagactgcgagcttgctcgtgaaatccagaacatcatgtttgagtccaaagaatttctgaagacacaggaaatcaatcagaaaagagagattccagcaaatatggtctggctctgggggcagggtgtcacccccaaactacttaacttcaaggagaaatacggcctggacgcggctgtcatcaccggcgtggacttgctgaagggcatcggagtgttcgctggcatggagatcatcgatgttcccggcgccacgggattcttcgacaccgattatgaggccaagggaaagtacggcatagaagctctgaagcggaatgacgtgctgtttattcacatagaagcacctgacgaggccgggcacgcccagctgctggacgagaaggtaaaggcgatcgaacaaattgataaattcatcgtcggccctatcctggacagcctcgagggtcaggactaccgcgcagccattctgccggatcacccaacccccatcgacatcggcacacatacgcgggatgacgtgccgattattatgtacgcatccgatatggagggggatgactgtgtggcatttgacgaggtgtctgtgctcaatggaagtataaccaagaaagaagggtacaaactcatgcaaaggctgattgatggagacttctga

SEQ ID NO: 9426 - DNA, 636 bp, synthetic construct
  source 1..636: mol_type = other DNA
atgaaggtgctcctcgtaaacgggagccccaacaggaaaggctgcacatacaccgccctgtcagaagtggcaaatgtcctgaatgaacacgacattgagactgagatcttctggatcaaaaccaagcccataacaggctgcactgcctgtggcacctgtgctaccattggcaagtgcacctacgatgctgacagtgtgaacgagtttgttgagaaagcctacgaggctgatgcgttcgtcttcggttcaccagtgtattatgccagcgcaaatggctcgatggttagctttttagaccgggccttctactccaacagccatggaaaaggggcggaagcctttaagcacaagcccggggcagtgatatgtagcgcccggaggggcggaacaaccgcaacttacgatcaactgatcaagtacctgggaatctcccagatgcctattatctccagtttctattggaatatggtgcatgggaacacgccggaggaggtgctccaggacgaggaaggactggggacgatgcgacagttggctcacaacatggcctttttcctgcagtgccttgaagccggtgctgaaaaaggcctaaaggtcacggaggagccaaagcctcgcacaaacttcatcagatga

SEQ ID NO: 9427 - DNA, 1356 bp, synthetic construct
  source 1..1356: mol_type = other DNA
atgaacatcttcaaaactcctgaaggttacatatacagcaacaaggcgctgctcgctctgttcattcccctcctgatcgagtatgccttggagtttttcgtaggatttgccgactcgataatggtggcaagccttggtgaggctgccatctccggcgtgtcgctcgttgactttcttattcagctgcttatcttctctttttcagctctcgcaactggcggagctgtggtggccggacagtacttggggaataagcaaatagacaaagcccaggactctgccacgcagctggtgtggttctcaaccatcctgtcagtcatcctcatgatcattgttatcattctgaggcagtacctgatcgggatcttgttcggccaaatcgaagtggatgtgtggcaaaacgccgataagtacctctacatcgtggcactctctatcccctttttagctatctacaacgccggcgccagcatctttcgtaccacgaacaacgcctccctgccaatgaaaatactattcatttgcgacatcctgaacattgtggggaatgcgatttgcatttactatctgggatgggatgtgcacggtgtggcaatccctacggtcataagccggctgctgtccgccatcctaatattgcacttcgttgtgaatgaggattataagctgcacattaagcggacattaattcataaatttgactttaagatccttcgcaaggtcctccaggttggcattccctatgggatcgaaaatgggctgttccagctgggaagagtgctcgtgctcagtatcgtgtccacatttggaacaatggccatcgcggccaactcagtcgggtacgccgtcgggatattcagtgtcttgccaggtttcgcaattaacctgggcctgaccgctataatctccagatgcgttggagctaatgactacgaacaggtccgatattacaataagaagtgtttaattatcgtattcgtctcccacatcgtaatcaatctgattatttttgcagcccttccgctaatcttgaacatttacaacctctccgctaagaccgccgccatgaccagtgagatgatcatttggcatggcatattcggcattatcatatggccactgtctttcacactgcccgctacatttcgcggcgctggcgatagcaaaagcgtgatgtatatcagtctgatcgtgatgtttacctgtcgcattgcgcttagctatgtcatcgcggacttcatgggcgttggtgtattcgggacttggatcgcaatgttcatcgattggtatgtgcgggccgcaatttatatttacaggtacttcagcaataaatggaccgagtacagggtgatctga

SEQ ID NO: 9428 - DNA, 408 bp, synthetic construct
  source 1..408: mol_type = other DNA
atggacggcatcgtgtacaagaacactcacaactttagtaaacgcgagctcgaggagctatttctgtctctggaatggtccgcagggcatttcccagacaaactgatcattgcaatgaagaacttcaagacagtcttcagcgcctgggatggtgaagaccttgtggggctggcgtgtgctatggacgacggcatcatgaatgcctacgtgcactatctgctcgtgaagccggagtatcagttaaaaggcattggaaaggagttgctgaataggatcaccacccactacaaagattacatgcggattgtagtcgttgcctatagcgacgaaatcaagttctacgaatactgcggatttgagaaagccgatgatgcctcacccatgttcataacgaagctctgggcttga

SEQ ID NO: 9429 - DNA, 774 bp, synthetic construct
  source 1..774: mol_type = other DNA
atggtcctgttccggggagacatcaagtgtaagagcctccagcggcgcaccagcattagtgtgatactgcctgcggacaacatccacttcctctccgatacagaagagatcgtccctcaaccctacaagaccctgtatctgctccatggactgtacggaagcgatgacatctttctggcaaacacatctatccagaagtttgccgaagaccatggaatagcgatcgtaataccatgtggggaaaacagtttctacctggataacaagaaagctcacgcctattatggcgagtatgtgggccaggagctcctagacatcaccagaaacattttccccctatctgacaatagggaggacacctttatcgcaggcttctcaatggggggctatggggccatcaggaatggccttaagtactccaagaacttcagtaaaattggcatgatcagcgccgcattaataacggacgaaatcgtggattacacagatgacgacaatgtgctctggagcaactcattttacaagtcctgctttggtgatttggacaagatcaaaaactcggataaagatcccaaatatcttattgagaatactgccgatattccagacattttcatggcctgcggtgtcgacgacttcctgtacgataagaatgtggagttctacgagttcctggagtccaaagacatcaacgctgaatttatgcagtctccgggggagcacacttgggacttctgcgatcgatacgttaaggaatttattaaacgcttgtga

SEQ ID NO: 9430 - DNA, 444 bp, synthetic construct
  source 1..444: mol_type = other DNA
atgaagtgtcccgaatgtggcaacgagctggacgaggacaattactgtagcgaatgtatggaatttatcgataaccccattggaggcaggctctgcccatactgcggggaggagctggatgaagataactattgtaacagttgcatgcagtattactacgaggaggaaaatacacaggaactggaggagatcgactatgactccatggtgaataacggcgactccatctgccttaactgcacgttttggtctgtctccccgtacgggtcggctcatggaatgatctgccgcaaaggtcagataagtgacggccctggagacagctgcgggctattcgtgcaggagtacaacttcgccaactacggtgatgcaggccaatatcagttcaatgagaccaatcgggccatttcaaacaagctctatcactggaaaaatagcgggtga

SEQ ID NO: 9431 - DNA, 1617 bp, synthetic construct
  source 1..1617: mol_type = other DNA
atggagaggatttttctgacaaagtacatcatcataaccggaggggtagttagttccataggcaagggtattacctccgcctccatgggacgaatcttgcgctcctacggtctcaacgtgtcagctatcaagatagacccgtacctgaactgggattccggcacactcaacccatatcagcacggggaggtattcgtcacgagtgacggcatggagaccgacttggacctcggccactacgaacgctttctggacgtggaacttaaaggccttgccaatatcaccactggtaaggtttacgagtccgtcatcgccaaagagcgagagggtggctatctgggggaatgtgtccaggtcataccccacatcactaaccggattaaggaaatgatcagggagaactccgagagcgcagattacgacgtggtgctggttgagctcggcgggactgtcggagacattgagagccagcccttccttgaggcactccgccaactccgcaacgaggagggtcgggagaacgtgatgtttgtccatgtgacattcattccctacctggatgcagcgggagagtttaagaccaagccaacacagcactctacaaaagagctgagaagtgttggaatcaaccctgatgtgatcgtatgccggtcacagaagccaattgatgacgggctgagaggcaaaatcgctcacttctgtgacgttgacttcgaagcggttgtcaatacgcctgacgctgataccatctacgaggtgcccttagtcttggaagaacacagcatcggcgagctgatcgtcaaaagaataggactgaacatcaaacctgattcgtctaagctgaatgaatggcgcgaagtggtaaaaagcctcaagatcaaggagcctaaggtgaatatcgggattatagggaaatacgtggagcttgaagactcatatattagtatccgggagtcactactccatgccgcggccagcattggcgtgaaggctaacattatatatctgagctcggacgtggaagagctggaccaggatgccatgagcgaactggacgggattctaattcccggaggattcggggaacggggcttcgagggcaagctggatgccatcgagtatgccattgagaacaatgtgcctttgttcggaatttgccttggcatgcagagcatggtgacccaatttgccaggagaaatgggttcagcggagcaaatagctccgaatttgatgatgacctgaagttccccgtgattgacatgatggaggagcaaaagaaaatcaagaacatgggcggcacaatgcgtctcggatcgtacggttgcaagataatcgaagggaccaaaacttatgaagcctacggcgagagcgacatcgaggagcgtcaccggcaccgatatgaatttaataatgattacagggatggtctgcaggaaaagggcctaatcatcagcggaacgagtccagacgacttcttagtggagatcattgagttgccgaaccacccctgggctgtggggtgccagttccatccggaatttaaatcaagaccaaataggccccatccactgttcaaagcatttctggaagctatccatgattattctaagaactga

SEQ ID NO: 9432 - DNA, 867 bp, synthetic construct
  source 1..867: mol_type = other DNA
atgattattacgacaatcttcctgatccagatcatcataacagttctgttttcaataatggccgccatttacgatatcaaaagcaacatcgtgcctaacaaactcaactattccctgatcttttttggcttattcagcaatttaatcctctccattatttcaaacaatatcaagtacatcctggcctcttttatctccatgtttatcacctacgctgtgacttatatgctgtggaagctgaatatctggggaggaggcgacgtcaagctcttcaccgcaattgccacagtaataccatctggtcttaacatcaacttcttgaacattttcccgcaactgtccgtgtaccccttttcatttagcgtggtaattaacagtatcctcgttagcttccccttcctggtgatcttcgtcacccatctaatatttaaaaataaagtgtttatgggcaacatcgattttctagtcaatatcttcaacatcgaaagtctgaagtacataaaaaatagtactctcaacaagctgattcctattaaggacctcaaggaagggatgatcgtcaacgactactacttcaacaatgagcacatcatcgagcttttgtccgagatggggggtaatctggagatttataagtcgaaccggaatgatttcaagtattacttcaagagccagagcgcaggcggcattaccaatgaggaagtgtggcagcttaaaattatgaacagtcaggatataatttccgacaatatatcgatcaagctcagctttccattcgcgcccgccatcttcctgggactggtcatcgctattgtgtatggggacatgatgatgctgatcattaaaaacatcttcttggtgatatga

SEQ ID NO: 9433 - DNA, 429 bp, synthetic construct
  source 1..429: mol_type = other DNA
atggttaaagaaagtggcgcccagattagcttagagtatatgttgatcttttcaatatccctggtgatcctgatcgtgttcacactgcccctcgctgaaaacagcattcggaacactctcgacgtctccgactctctgaatgtgaagagcgacctcagcaaaatcgcgaacgcaatcaagcaggtgtacggtgagggccaaggaagtaggcagaccattaagattgaaagtaacaagaaactaaagataaatatagccaacagccatgtttctacatcgttcaagcttaagtccaactccaagaaggatatcaaagagcacgtcatgtcaaacattgggaaaaccaccatcagcctgaacaagggggagaatgtgatcattgtggagtggccagtcaattctaaaaatatgctgatctacacggtatga

SEQ ID NO: 9434 - DNA, 804 bp, synthetic construct
  source 1..804: mol_type = other DNA
atggacataataactacaatcatttacctcgtgctcttcatcgtcatgatggtcttcgtcttctcgattggaatgctgagacagtacatgcctaagcgggaggtcatcctggtaatccttgtagcctttctgattgggtcaatcggaggggcatttttcctcgaccccatctatgatgagttacccaacgtggccagtgtgattgagaagaacatgccaaacaacgaagagacactgtacttggatctgtcatcgtccattaatattgatgacctgaagaacaatctatctgcaactgacggattcattagtttcgacgaaaagagcgttaacatccccatgtggacgttcaatgagcgcgagcacaactacttcgacgaaatcgtgggcaacatcgacagcaattacaaagcgtataatatcagtacatccgagatccagataacccttgccgacaactacacctctgcccaggctcttaaatcctttagcgattggtataaactggtgtatggcgaaactattagctacgcgcaggtgcatgccgtactggttgtggactccagcagcctagatacgtttgagcacatcctgctccaaaagggcatcgtggctagcaagattgaagggccgatccaggacacagtcaacaataccaattcatccatgttgaccaacatagagtttaccctcgtctgcggcggcatcggtgtggtggtggcattcatgggtatatacgttgattctgttgtgccagcctataggaagtttagaaaattcctgagggaaaaacgccgacggtga

SEQ ID NO: 9435 - DNA, 690 bp, synthetic construct
  source 1..690: mol_type = other DNA
atgaatgtggccgtcctgttttcaggtggaaaggacagtacgatggcactctacaacgctctcgattcgaaagaggatgtgaaatacctgctgagcatgaaatccaggaacgatgaatcatacatgttccacgtccctaatatccacctaactgacttgttgagccaagcgttcgacatcccaatcatgagcgtggaaaccgacgggattaaggaggatgagcttaaggacctgaagcaggccttcgagaacctcaaggaccttggcgtcgaggccatctatacaggggccctctactcccagtatcagaagagccgcatcgaacagctatgcgatgaagttggccttgtggctatctctccctattggcatgtcgatgagttggagtacatgcggaagatagtgagcctgggcttcaagattataatcagtggagtagcagcttggggcctcgacgagagctggctgggaagaataatcgacgacgaaaccattgacgagttaatggagattcatgaaaaatatcacgttgatctggcctttgagggcggggaggcagaaacactggcgattgacgggccgatttttaagaaacgaattaaaatcctgaagtacaagaaagaatggcacaatgactccggtgtgtacatcatcgaggatgccgtgctggaggaaaagatgaacctgtga

SEQ ID NO: 9436 - DNA, 540 bp, synthetic construct
  source 1..540: mol_type = other DNA
atgcaggtcatggggatctcaggcctaccaggaagcggcaaaagtttagttagcaagattgcaattgaaagaggcgccaaaatcgtgagcatgggagacatcatacgggaggaatcgaagaagagaggggagagcaccaaggagacggcccagaatctgcgcgccgagtttggacagtacattgtatccgaactcaccatcaagaagattaaaaaactgcaggaagagggcttcgagagcaagatcatcgtggaggggatacgaagtccgcacgaagtgaacatgttcaagaaaaacttcgagaactttatcattctgtccatcttcgcgaaccccaccctcaggttcgagaggctgaaaaaccgcatgcgggaggacgattccactgattatgtggaatttaaggctcgtgaccaaatggagctcgacttcggtattggtgatgtcatctcactgtccgacaaaatcatcatcaatgagacagatttggaaagctacacaaacagcataaataagtttcttgacgagattgaactgtga

SEQ ID NO: 9437 - DNA, 738 bp, synthetic construct
  source 1..738: mol_type = other DNA
atgatacccaagagccaccctcgatacgagtcacttctgctcagagataagatggttaaggcctccaaggagggttatctcgcggatagtgcgcttatcgcccatgggaggggcgaggcttttgactatctgattggagagaagactacgtaccccgccaagcgggcaatgtatgtggctgtcgccgctctgctgttatccaacaacccggtgattagcgtgaacgggaatgcaaccgccctggctattgacgaaataatcgagttcgccaatgccatcaatgctaagattgaaattaacctgttctacaaaaccaacgagagagtcaagatcatcaccaagctatatgaggatcacggctaccgcaacatacttggcggcctcgacgacgatattgaatacatcaatgacatagaaaacaatagggcgagcgccagcaaaaacggaatctacacagccgatacaatcctgatccccctggaggacggagaccgcgcagaaatcttgaaaaagagtgggaaaaacattctaacaattgacttgaacccactgtcgcggacgtccaagatgagcgatgtatcaatcatggacaatatcgtgcgtgcaatcccattcatgacccagatcgccaatgacttgaaaactcaggataagaaaatcctcgtggagctggtgaatgaatttgacaacgaggagaacctcaaagaaagcctggaacaaattaaagtcaaggagtga

SEQ ID NO: 9438 - DNA, 384 bp, synthetic construct
  source 1..384: mol_type = other DNA
atgaaaatcaaactggcaataatttttggagtgctcatctggatcttgaccttcgtgctgagcgccacattcaacccaatctttacgaccaatgttcgcaatgtcaacatcgtggtgcccattattactatcatcgtaactgggttcttcggcatcctctatatccgggccattgacactaatgagattgtggaaggctttctggtcggcataatctttgtcataatcgacattattcttgattacatattcatcatatccctacagaagaacctgtacatcatcgggaactatacactgcacgtgttcagcatgatcacaattacgctcctgatcaccaccttcctgggatacttagctcagatgaccattgaccttaagtga

SEQ ID NO: 9439 - DNA, 1035 bp, synthetic construct
  source 1..1035: mol_type = other DNA
atgaacgcctatattgaacacgagaagtacctgaaaaacaccttgctcggccttaacaactcctcagattccaagcaaaaggaaaagagtctgagcagccactactttaaggatttgaaagagaagctgctgatccagtatgagaataagtcactaaaagatgtcatggactgcaatatatgtaacacaagctttggggacgccctcaaaataaccaccaaagaaaaaatcgatttcaacatctatgacaacaactttaagaaccagatcaaccacaacctcaagctcctcccgaaaatcggcctgaaaactgaagaaaatctcaagaataagggatacatgacaattgagagccttaagaaccatgacaaatattgcgacaccgcgtcgaagttcctaaataaaatcgacgacatgtcttttcacgaaattatggacctgctggacaacaataggtacagcaagaagtgccgggataatctgctgaaatgtataagtctaacggatgttgagaacttcaaattcatggatatcgaaactaagggactcagcaatgtgcccatcatcttgatcggtgtggccgaaatcaagaagtgtaagatcatatcttcccagtatttcctgagggactacacagaggagcagaatattatcgaggcatacctcaatcatttggatgaagactccattcatgtaacattcaacggtaagagcttcgacgtgccatttattcggaaccgctgcatttacaatagaattaaccacaatctggagctgcctcatctggatttaatgtactttgctaagaacttatggaaagggtcacttcctaatttcaaactgcaaacgatcgaggaggagattttcggcataactcgctatcgagacgtccccggccagtacatcccaggatattacgacacctacctgtccaagaagaacatcgggccagtggtccccattatccagcacaactgccaggacatcatttcgcttgcaagtttcctggagaaaatgtacgaggatgtgaattga

SEQ ID NO: 9440 - DNA, 1503 bp, synthetic construct
  source 1..1503: mol_type = other DNA
atgggtctgttcgatcgattcaagaagagcgataaaaaggaaaagaagttgattccagacaacccggagattgaagacgaggagctacgcctgaaagaaatagccattaatcacaaggacaggctggagagggcgcaagccgcagataaaatctcaaacgaatttctcgcactggacatggctaagaccgtgaaagacagggccataagactcatcgcggccaataagctgaaggacgaagaccttttaatggacgccgctctgaacagccagttcttcgatgtacgcagctttgcatgggaacgtctgggggagaacaacaagtccatcgctgaaattgtcataaataccaagaaaaactctcacgtcgatgagatcttcaacaaaatcgtggacgaagaaactctgaaatggatcgcaattgaggccgtggacaagcggtatcgcacacgggccctcaataagattgacgatgccgggatactgtacgatcttgttttcaaatccaatgacagtagtattaaaaaagccgccatcctgaaagactcttttgtaagtgaggacattcttaagaaggtcgccatcgaggacaaggatgagggagtaaagaagatcgctattggcaaaattaagaatgaggactcactggttctgatagcgcagaatgaggataatgcgaaggtgagaagcttcatctttgacaagatcaacaatcccgagaacctcaagcatatcattttggactctaaaaaggccgacgtcaaaacagaacttattaacaagatcaccgacagcgaccttctggccaagatcgcactcgaagataacgacaatatcgtgcggagtgaggctgtgaagaaaatcactgacgaggagatcctgatcaaaatcatcagcacggagaaagatcgcttcgtgcgccagattgctgtgaagaacatcaacaatcctaaagagctgattaagatagctctgaacgacgatgaccagttcgtcagaaaccacgcaatcagcaattctgcactggccgacgaaaaagactttaagtatttggccatcaactccatacatgaggatgtggcatcggaggccctgaatcacattaatgatgaaaacgacttcatcgatatactaaagaacgcaaaactcacatcaattcgaaaaaacaccctagataacatcagcgatctcgaaaccttaatccgaattatcctctcaaacgaggatgaagagttttcgctcaaagctttagataaaatcaaggtggagaaatgcctgattaagatatacgagcagaatatctccgaaaatatcagcatcagggccattagcctgataagaaatcaaaagtacttgggcgaagtcgctcggaacgattcctcctggaaggtgagggaggcggctacgaagaaggtggtcagtagaaaagttctcaaggagatctccaacaacgacgaaaacgagtacgtgcggaacattgccaaaaagaagttgaagctgtga

SEQ ID NO: 9441 - DNA, 759 bp, synthetic construct
  source 1..759: mol_type = other DNA
atgaagaagatcaccaggatattctttagcccatcggggactaccaagaagatcgtagataaaatagctacgaacttcaaatacgagaaagagatttgtgatctgctgcatttcaacgacactaaggagtttacagactcagacatcgtgatcgtgggcatgccggtgttttctggccgaatcccaaagaccgcccgcaacagactcttgaagctgacagggaataacacaaaagcaattgctgttgctaactatggcaacgcgaaagtcggcgacgcactcattgagttagtagatattctgaaagaaaataacttcgacgtcatcgccgccatttccaccgtcagccaccactccatttttaatggtgtggccgtgggacggcctgacaccgcagacatggagaagatcaatgagtttggacaaaagtgcgtcgaaaaactagaatctggggaatccctcaacagcgaggttcccggaaacagaccatatgccgattacaagcagcttccttttatcgtcagctgtgaccagaataagtgcatcttctgttacgattgcgtgactttctgccccgaaaacgcaatccctgatgaggaccccgccgatgtggaccttgacatatgctcacggtgcacggcttgcatccacatttgtcaggaggatgcgaggagcttcaccggtgaggccttcgagacaaaaaagcccgtgttcgagagtgaaaatagtgagcgcaaggaagtggaactgtacctgtga

SEQ ID NO: 9442 - DNA, 1032 bp, synthetic construct
  source 1..1032: mol_type = other DNA
atgatggagctgatgagagagctcagcctgacaccaggcgtgagcggctccgaggaaaagatagctgagatcattacacgggaactcaaggatgtcgccgacaagatcgaaacggacagtatgggaaacatcattgcaaccaaaaagggggaaaagaaggctccaaccgttatgctagcctcgcacatggacgagataggcctgatggtcaggtacatcgacgatgacggttttattaaattctcaaacattgggggaatcaatgatcagatgctgatgaaccagacggtcaccgtgcatagctccgtgggcgagcccatcgtaggcgtcatcggctcaaagccacctcacgtgacaaccgctgaagaaaaaaacaaagtggttaaatctaccgacatgttcattgacatcggggccaaagacaaagaagaggcagagaaaatggtgcggattggagacaagatgacattcaacagcctgttcgctgagtaccccaataatctcatcatgggtaaggccctcgacaaccgggtgggttgctacgttatgatggaggtgctgaagagagtagatactcgcgccaccgtttatggggtcggtaccgtgcaggaggaggtagggcttaagggagccaagacctccgcatttcgactgaaccctgaccttgccatcgcacttgatgtgacactgtctggcgaccatcccggcattaaaccggaggaggcgcctgtcgtgatgggtaaggggcccgccatcatattggcggatgcgagcggaagggggatcttgacgcaacagagtgtgaaggatttgctcattaatgccggagatgaaaatgagatcccctaccagttagaagtgagcgacggcggcactactgacggaaccgcaatacacctgactcgcgagggcatcccaacaggggttctaagcgtgcctacacgttatatccacactccggtctccgtctgtagtatggatgatgtggaagctaccattcaactgatcacggaagccataaacaacctgtga

SEQ ID NO: 9443 - DNA, 486 bp, synthetic construct
  source 1..486: mol_type = other DNA
atgaatatcgagctggagagcatcgggacaatacacacggaatttaaggaaatcgaggggatgcccatccagcctactggtgccaaaggaatcaaaggcaccatcgagatcaaagataagttcgttgacggcctaaaggacttaaaggacttctcacacattcatctgatttatttgctccacaaggtggagggttacaagctggaggtcaagccgttcatggatactaaaacccacggggtgtttgcgacaagatctcccaaaaggcctaaccgcatcggaatgagtgtggtgaaggtcaacaaggtggaaggcaacaaggtccatgtggaaaacgtagacattcttaatggaacccccctgctggacattaaaccatacgttccacagctctacgaagacaccattgatgagctcaagataggctggttcgagtccaaacaccaaaaagcaaagtcccagaagagcgatgaccggtttaaatga

SEQ ID NO: 9444 - DNA, 207 bp, synthetic construct
  source 1..207: mol_type = other DNA
atgcagctaagtgcgcggaatcagctgaacggtaaggtcactggcgtggagaagggggcagtaatggctaacatcaaaatagaggtgtccgaacccagcacgatcacagccattattaccaaagagagcgcagaaaaactcggcctggccgaaggggatgacgtgacagccatcatcaagtcaaccgaggtcatcattggaaagtga

SEQ ID NO: 9445 - DNA, 438 bp, synthetic construct
  source 1..438: mol_type = other DNA
atggtcgtacgggtcatagaatcaaaggaggacaaaatcacgacagcggacctcatcgacgagttgaagaaaaattccaaagtggattactgcggagcaattttcagttttgaggggtttgtgcgcgggaaagaagagaacatgaacctgcagaagctgattctgactacccccgataaggaaaagacaaagtccgagatcgagaaaatcgtggagaacgccaagatcaagtacaatgttgccgaaatcagcgtggtccactacatcggtgagttctacaccggcgaccttctcttcctcgtggcagtgctggggtatcatagggacgagagctataaggccctgaaggaagtaatagagaccgtgaagttcgatgttgactttaaaaaagaagaaatttctgatgagggaactaaggtcattctagctggcggctga

SEQ ID NO: 9446 - DNA, 534 bp, synthetic construct
  source 1..534: mol_type = other DNA
atgaacaaagttcgggggattttcattggacgcatgcagcccgtgcacaatgggcatatgcagattattgacaagatcctcgaggaagtggacgaaatcatcataggcatcggcagcgcccagctgagccacagcctgaagaatcccttcaccgcgggtgagcgcgtggtcatgctcaaccaggcacttgctgaaaggggtgtcgatccgtcaaggtactacatcatacctatgcaagacatcaactttaacgccctttgggtgtcccacgtgaagatgctgactccaccattctccatcatttatagtggaaaccagctggttaaacaactgttctcggaggaaggctttgaggtccgacagcctcccctctacgacagactacggctgtctggaacagaggtgcgtacgagaatgattgagggcggcaattgggaggaattagtaccaaacgccaccatcaatttgatcaacgaaattaacggggatgagaggatcaagaatctgtccatacgggagatcagtgagatctga

SEQ ID NO: 9447 - DNA, 711 bp, synthetic construct
  source 1..711: mol_type = other DNA
atgaataaaaagatgcagtaccagatactgctcattgttctaatcgctatcgtaatctttaacttaagcatcatcgtcagtagcatgatgaacactcccgataatgtttataacatcaccaatgtagggcacaacgctaatggtaccgtgtacaagatcgaggccgggaacatgtcctctaatgagaccgtgggactcatcctgggcgtccatccccgcgaacacgaaattcacgaggcggtgaataataccatttataatattacttccgagaacggcacgaacaacctgacgaaaaagtatgtcatatactacatcaagacaaaggacaacttgacttcccgggaagatacaaggcctgccggcgaagaactggccaacaaattcattgttccaaatatcgtgaaggacaagccattcatcgtcttggacgtgcacgaaataaacccagactatgagtactcaaattttatattcagtctttccaacagaaccaacacagtggacagctacatttctcatattgccaacgatgtgaacctggtggattaccagttctcggaggggacaagccctgagaaggtgaccaaaccgattgccagcaagggagtcactacactgctgatggagacgtcaatcaccgacgcactgatggagaaacaaaagaccgcagacaaccttatcaaaagcctcgatagtctcgagccctga

SEQ ID NO: 9448 - DNA, 675 bp, synthetic construct
  source 1..675: mol_type = other DNA
atggaaaacaagaacatgatcattatttttgcggccgtggctgtggtcatcattgcaatcgccggcatcctgttcgctaccggattcatcggcgggaatgacgtcgagaccaccccatttaagatgagtttcatggaaggctccttcatagggaatgtcagtctcgagaatgacaaagagaaattcatgcactcttacgaggataaagagaacaagataacctacaacatctccactgtggacaactcttccgtactgatggagatatatcagatccagggactagggaaccccgaggtgaggtcattcaatggcaacgaatggaacatttactttacacaggccgtgccgaataataattcaagcactaatagcagtaacggggacgacgcaatgaacatcatcatcggagaatcccaaggtaagaaacaggggtacctcatttatatgattattgatggcaaatcgaagatcaacgccaccggtaagatgtatggcgaggcctatacgaactactttgagcctttgctggaaagcttaacactcaaggaaagcaagaacgttccccatatctacgatgagtttggacttacaaaagaacagttcgactaccagatcgatctgatacggcagtataagagcggcaatacgtctgcgctgcagggagctcaatga

SEQ ID NO: 9449 - DNA, 531 bp, synthetic construct
  source 1..531: mol_type = other DNA
atgcgaattacagttttccacgcaaatgagtgcgaccgcaagaagtgcacgagcatcaaaatggagaaaatgggaaagtgcagactggtgtacgacataaacaaaatccccggtggcgcagtcgtgctcaatccctacgcggagaaagctgtgagctacgaagactacaaatatgtccagcggaggggcgtggtgggcttggactgttcctggaatgaggtaagccaaagcaagaagttcttctccctgtcaaaatatcacaggtccctgccttttctgatagccacaaacccggtgaactatggaaagccatgtatcctgtcgactgtggaagctattgccgccaccctgtacatcacccgcttcaaggacgaggcgtatgatatgatggatgggttcaagtgggggcatacttttctcgagctaaatcaggatttgcttgaggcctacagtgaggtcgacaccagtgccgaagttgtccggctccagaacgaatttttagaaaactcaaagaaggaggtaaacgattga

SEQ ID NO: 9450 - DNA, 147 bp, synthetic construct
  source 1..147: mol_type = other DNA
atggccagattcgaagaggcagaaaacaggatgtttaatgtgaaaatctgcctcaaatgcaacgcccggaacccagcgggggccacaacctgccgaaagtgtggctataagggcctgcggtacaaggctaaggagccccgcggatga

SEQ ID NO: 9451 - DNA, 753 bp, synthetic construct
  source 1..753: mol_type = other DNA
atgaaagatgtggagaactatattcgagatatactgaagagtaggaagatacactttactctcattgaccctgacgaacagacaccagaggaggcgctagagatagccacgcaggcaatcgaaggtggcaccgacggtatcatgattggaggatcgactgtgaatggcgacgatgtcaacaacacatgcaaaatcctgtctgaaaatatcgccgttccgatcattatcttcccgggcaataccagcagcgtcagtgaatacgctgatgctattttctacatgagctatgtcaactcaagagacccatactggatcaacggtgctcaggccctggctgcccctgccgtgaaggcaagcggaatggagatcctctccatgcattacatggtggtgtcccctggcggaacggttggctgggttggggacgccaatttggtaccccgcaacaaacccaagatacccgccgcgtatgcaatgtccgccgaactgtttgggatcaagttcttctaccttgaggcaggttctggggccgaagagcccgtgccacccaagatggtggggtatgcgaaaatggccggcccaaagaacattctggtcgtcggcggaggcatccgggacggcaaagcagcttacatggctgcaaaggccgggggggacgtgatcgtaacagggaccgtggtggaagaggtcgatgatgtgaagaccaaaattcaagagatcaccggagctatcctcaaggcctcaatggagtga

SEQ ID NO: 9452 - DNA, 1074 bp, synthetic construct
  source 1..1074: mol_type = other DNA
atgctcaactcattatacgagaaggccatcgctaagcgcggcttcatccatgacattgacagccagactgacgtggagagccaattggagtacaagtggtttaatcgcgacattctagaaatcgacaatggtttctccatcgctgccggagatggaagtttcaacaagaagaaattcctaactacgaatttctgcgcagttggcgccgagtccataatttatgatgggaaaatcaagaagatagatgactccgacatcttcgacatcccgcacgtctctttcctggatgagttgctcagtaactacatggcgatctacgaactgaaatgtgcccttcggaccatcaaggagtacaatgtggactattatatgattgacggatctatcctgggtgatctgcagaacccattcccacgtggggccaagctgccctccaaacttaaaaataatctggacgatattctccttaaagaatttgagagaagactgaacatcaaaaaatatggcctgatatttccagagattagggactcactcaacctggttgaatttcctaagaacgagaatagcaacaaaatcgaagagtacaatctgcaccttgcgtcgatcgagaagataattctcctgaaagagatcctccagtttcgaaaaaaaatcatctcaattagcaaaaccagcagcgacaacgatctgtttcactggaacattcccgacattgcattcctggataagttcacagagaagcagggcatttcgctgattaagcacaaaaccgtctacaaaaagaccgcctttccctactttaacgatttcttcaagagtataacattcacgatcttctacattcggctgcaggacaataagaatgtgttgaaggtggaattgccttataaggcaagcaaagaggacgtctttgaactcatcaagaagatcaacgctctgaccgtgcaagggtacccctatctcctgaacaaggctcataacgatgtggtaatcacagataagaacatcaaggaattactaaagatagccaagatctatgaaacaactaacagggaggtgatgtcctggtga

SEQ ID NO: 9453 - DNA, 1488 bp, synthetic construct
  source 1..1488: mol_type = other DNA
atggtcgtgggaatttgcatcggcgagacttccctcacggaggtaaccttcatttcagataagatgccaaaggtgggcgaatacgtgactatcgagtatgacggaaagaaggtgctcggcatgatcgaaaatctgataaggggaaacgactctctcaacgtggacattaatgacttcaacgccatacagaagattagcagaattggggccgaagacaactacattaagggtagggtaaagatcctcggggatgtgaacgacaacctgaagttacctcgcacccccgtccttcccggaacagaaattcacctagctgatggagagattcttgacaaaatattcaatgtcaagaaccccatcaagctgggctgtctggtcaatcaaagtgatgtggatgtcaacgttgaagcaaaccctatccttagccggcaccttgccattctcgccatgaccggtgccggcaagagcaacaccgtcgctgtgcttatagatcaactgctgggctacaatgtgcctatcttcgtgtttgacatgcatggcgagtataaagacgcggagtttcccaacggcaacgtgaatgtgatcatgccgaagatcaaccctcactatatgaatttctacgagatcaaaaaattggtaaacatcggcgccaatagttttatccaggaacgccactttcggagagctttcaaacaggctgagaagaacatctcagacggcatcgcccagaccaacaacttcctacagataatgtacgacatcctcgataaagattcccacgttgaaggatcggataaacagatcgtggacgtcatgaataagatcgatgacgctatggagcgatactccaatctgttcgacaaaaacatcggaaatattttgtctaatgtcaagcgagggtatgtgaatgttttggacttaagccaggttgatgagagtgtggccagtgtcctcgtgagccacatcctgagaaacgcactgaaacgctccaaggacgcggcacacacgggggataaaaaagacctgatcgataattcagtcttctttattctggaagaagcacacatcctggcgccgaataagcgggagtccgactctaaacgctggatacagcgagtggcaagagagggacggaagttcggtctgggcttatgcctcgtcagccagtccccaaaaacagtggatcatgatgccctgtctcagatgaacaacatgattattctcaggctggttgagcccgaagaccagaggcatgtgcaatcagccagcgagagcttgagccaagacttgatcaatcagctgccatcgctcaacgtgggggaggctatcgttctgggcctaatgagtaagataccaacactggtgaaaattgacatgtttaagggtcgtcggcatggggacgatatggacctgatctcttactttaaggagctgggggaggactccgactacaacgacgaaactgtagatatggggtatgattactga

SEQ ID NO: 9454 - DNA, 1242 bp, synthetic construct
  source 1..1242: mol_type = other DNA
atgaagtttgcccacttggccgatacccatctgggctacagacagtttggcctgattgaaagggagaaagacttctatgaagtctttgaaaaggtgatagacaaaataattgaggaaaaagtggatttcgtcattcatagtggggatctctttgaaacagcccgaccgagccccaacgcccttctggttttccagaaagggctcctgaaactgaagggggcaggaatccctatgtatgccatcgcaggcaatcacgattctgtaatgcggcagggagctatccctccgcaggtcatatttaagaaactggggctcaaggtcatcagccccattaacactgattatatgcacggagacatctttatcgccggactgccctactacccaagctcacagtccaaaactctaaaaagcaagctggcggagctgtcgaaaaaggcggccaaccacgagaaatcaattctagtactgcaccagggcatcgacaaatacctcggataccaatacgagctggaaataggcgacataccagataattttacttactatgctttcggccacattcataagtatatcaacgaatccttcgggaatggacggctcgtgtaccccggatctgtggagatctggaaaacggacgaggtggaagattacaagaagaacgggaagggtttcgtagtggttgaccttgagggccccaagccaattgtgaaaagggtcaagatcgatgttcctcgcgagttcatcaagcgctcccttgattacgagaacctggagagtggtatcgcaggtatcaaggagacaattaaggacttcgacaaacagcctatcctcaatttgacaatcaaggatgtggagtctgatacaagtggggtgtatgacatcattaacgaggacttaggcgacttgagcctgatgattagaccaaaattcaatatcaagggcgaggagcttattgacgaggacaatatcaagaagaacggtctgggcgctaaggagatattggtggaacaactgaagaaatacaacgatgacaatgtcacgcagctagctatcgacctgtatgagtacctctccaaggataagattgaagagtcaaaagatctgatcgaacagttctacaacgacttttataattccaccaaggacgaggtggaactccagaccgaggaaattgaacccgaaaccgcccaggtgaagagcgaggacgttcaagcaaccttcaacgaggtgttaaagtga

SEQ ID NO: 9455 - DNA, 2748 bp, synthetic construct
  source 1..2748: mol_type = other DNA
atgattttcaccaaactccgactccgcaacttcaagtcgcacgaggataccatcatccgctttgaaaagggcatcagtgtaatcgtaggtgaaaatggtgcgggaaaatccaccatcctggagggcatttccttttctctgttcaagcagcacaccgctaagaagatcgacgacctggttcgcaataatgcccagtccatgtttgtggaactgaagttcatttctaacggaaaaaagtacaagatcgtgcgtgagaaaaagagcaacctcaagtcagtcctgtacaagaagacatccctcgacggcgagtacgtgcacgtgtgcagtggggataaagaggtcgccaacgaaatataccagatcctggacatagattctgacctattcctaaatgcaatttacatcagacagggtgagatcgcggagttggttgataagactcccgccgagaaaaaacagctaatcgctaagctgctcggtattgattccctggaaaagtcctggaaacacctcctccccttcatcaatgactacgaaaaccaactatcggagcttaagggcaagctttacaattccaaggaactggcagacgacttgaccaggaaacgcgaggagttaaattcattaaagcaaagaggatacgagctcgaggagaacatcgaagaggtcagcgtacttctgaaggagatcagcgagagtaagagggacatggaacgcgaaaaggagatctacgaaactcaggtgaacaaccttgaaaatgaggagaagacactgtctaaactcgagcaggataagcacgtcattcagaataatcttgataacattagggaggccgaagagcagatcagccgattggagaagtatgtgagcaagctcgacgtgtatctcgattttgagaaaagcgtgttgagtatacaaaatctcaaacagaaggagcaagaaatcgaggacaaaattaagagcattgctcaacagaagcagctcgttgcagacaataaggagaactacaataaattcctggcttccgacgaggagatcaataaatataacaatcagaaggtgaacttcgagaaagagctggccaccatggctaagctggacaaagacaagaaggacctcttaaaggaggtgcagaatgaacggaatgaagttaaccaatttttcgccagagccaaagataagcttgatgattacggactggaccaggacagattggccaagataaacgacattaatagtattgaagatgccacaaacaatttctttgacgagatatctggaaagattaaaagcttaagcgacgatatcatcgccaagaacgaagaaatcgtggtctttaagcagaacatcaaatcaagccagaaaccactcaaagatctcaaagatgtggacagtaaatgcccggtgtgtcaggcggacatcgatgacaataagaagtcggaactcatcaaacagtacaatgctgagatcgaggagaacaccaagcttatctccgaatatgaggagagcgtgagattactcaccaagaacaaggccagttttgaggacaaatctgataaactgtcagagctgtccaagcagattatcgaatataaacacaaattctctcatttggagaaccaactggttaaattgaacaagctggacgatgaactggtatcaaaggacttcattagtgggaagctgggggaattgattctgattatcgcaaacaagaaggagaatcgtgagtcttacaaagagttttacgatgcgtacaatcaggccaaaggcgctctggaggttctcggcagtgaaatagacgcacaatacaagttaaagcaggtcaaaaatgaaatcgacaaccacgtcacgaatatcaaactggcaattgagcaagatccccacctgagcagagacataactgccgctgagcttcaggaccggatcactgacctgaaacataaaaacgaggaatacaaccagcttaagggctttattcagaataaaaagtcgtacctgacacagctggattcagtgaaggaggacatcggaatgtcgattaaccagatagatatcctgaaaaacaagatcaaggcctcagtctatgatacggagaagtacgaacagattatttaccattctgatatatatgagcggcggttcaacaagttcaacaacgagctgtcaggcatcaagggacaggcacgcgaaacaatcacgcaggtgaaagatttgacggggaagctagaaagcgtgaaggtcttccaaaaacagtacgacgacatcagcgattatatcaaccttctaaatcatttcaggagcctgtatagtaagaatggcattcagaaggatctgcggaacatttccaggccactgatccagaagtataccaaggacttcttcaacgaatttaactttaactatagcgacctgacccttgacgatgagtatgatgtgactgtgtatggtcctgaaggggaaagctccatgagcatggttagcgggggggaaaaaatcgctatagcccttgccctgcggctgggcattacacaggcaatggcgaacggggaactggatactattttgctcgacgagcccacaattcacctggactcctcacgaaggcacgagctcatcaacctgctgaaagagatgtccgtcctgcctcagatgataattgtgacccatgaaccacaactggagaacgctgccgacaacttgatcaaggtagaaaaagtgaacggcgtgtccaaagtcataatgtga

SEQ ID NO: 9456 - DNA, 396 bp, synthetic construct
  source 1..396: mol_type = other DNA
atgtttgaggacgagcgcgacaataaaatttacaacctaataatcacaaacggtttcgacaccaacaaggagtacaatcagttcacagagaagctgtactcaaagacggacttcctttggaaagagtccatgagcggagcatatagtaccgccggggaggaattttatcagaaggtggacaggattgtgctgttggccggcctctacaatgataacaaagaactcttcgaggatctcctgattgtcagcgaaaagtatgagatcccgatcgttctggtacggccattaggggtggaagaggtccccatcaaactggaggaaaaggccgcaaccattgtgggctggaacgcgaactgcatcatagatgccatcaaggatgctgctgaaactatgtga

SEQ ID NO: 9457 - DNA, 1281 bp, synthetic construct
  source 1..1281: mol_type = other DNA
atgaaggcagccgtcatcggactgggcgtggagggaaagaaggccgtgaactctctgctcaaccacggctgggaggtatacgccaccgacttgaatatcaatgttgatctgtccgggctgaatctaccaaatctgtcactggatgtcatcgacgagactcaaacagttagtatcgtgggagacggcataactctggatcttggttttacaaacccttatgacatcgaccagtgcgatgccgtagcaattagccccagcatgttcggaggcgaatttgccaccaaactgttgaaaaattcaaatctgctaagtgacgttgtcgacaagcacaaggatatcttcaccatcggcattacagggacgaatggcaaaaccaccaccgtccacatgctcaaggagatcttggagaacgctgggaagaatgtgttggtgggaggaaatgggggtgggggcttttcaggttactacgacttaatccttgaggccaacgaaggggaatacgatatattgctggtcgaggtatgtgatatgacactggacttctgcaagtattgcttcgatttcgacatgattggtctcaccaacattggaaacgatcatatgaacgtgcacaaaaccatcgccaactataaaaatagccttgtgcgattctttgagggaaaaacagtcttcactgcatttaaccaggacttcaacactgacttcaaagaaagcagcgacaagaacattccttactttgaatatcaggacgagctgaagctgttcggcaagtttaacctccttaacgctgggctggcaacagccatcgctagggagctgaagataccaaaggatgtgatcaagagtacactttcggaatttaatgcggtggaaggccgcctcgatgtgtacaaaattaacaatgtgagcgtttacgtgggcaaaacggacaattccgacgcattaacctccattctttcggagaaagatttttatgcgatcttcataggcacgccccgccataacgaaatccacagactcgatattctggacgccgccgtgaggtacaacccggaggtgattgtcctgttccccggactagacgataccctggacatggcggtttaccggctcaattccctcggctacatggggaacatcatcacggtcaattccctggacgagatcatcgaactggtggctgagtatagccatgaggatgctatactgatagggggcaacggtcaggacactctcatcaacattcaggagcggattaagttaatttctgaaaacctctga

SEQ ID NO: 9458 - DNA, 1188 bp, synthetic construct
  source 1..1188: mol_type = other DNA
atgagtagcggctggaggagaatcagcattacaatctgtctcgctttgatcgtgctgagcatactgtttgtggccttcagtgccgccaccaacgcgccttacaccgctcagtccgttgccgacgagtataatcttcccatcggacagtccatgttcgagaaccagtccattctgggtcagcaagattcaatttcggtcccactcatctcaaatgtgggcttccttcagcatcaaatcaccgccctggatatccaaggactgttaatgactctcactaccggtatggtgccatttgatttctccactgtatctagcgaggggatagactcctatggggatgtggtgaatgtcgagggcccaggatttctgacatttgagggcgacaaactggccgtgaagtcacccaataactatgtctgggggtacagtacaccctataaatggttggttaagactgacactggggtggatgtggttgagaacggcacggttgtgaaatctgtgcccgagaacgaaatcaagaaccttgattatcacaatgattactacaacagttcaaccatccggtcctggtataactacgacgcccacaacgggtctacattcactctagaaaaaggaatgaagggattctctgatggccggaacaacatttccgccgccgacgtgccagtcatattcgggcatgacgtggtagactacgcaagcgaatatcccaccgggagccctatactgctctactctggcaattacaccgaggaagacggcgaggcgtatggcacgagcctgggatcgcacgcagagtacggcgattccattcgcgaggtaaatgcaagacagtttgtcgacgcctggaacggaaccgtcatcccccctaacagcacctcaagcggtaaggactatgtgtactttgaaagcgctgttgacccaaccgcccctggaggaagtgcagcgcacggcgtctgcccgcctgctagggctctgcgcgccgcagtcacagctgaagggttcggtctacccgtgggcatgacctgggacgaggatgcagtgctcttcgggtacaatccggctcaggacattacagtgacaaacaatcacgactaccccgtattgatcaagatgtggacggaaggcgaaggtacgggcatggggatctactgccagattgtccgatacatcccgaagtga

SEQ ID NO: 9459 - DNA, 654 bp, synthetic construct
  source 1..654: mol_type = other DNA
atgtcaatctcaacgatcattaccgcggctggcaaaaactcccggatgaggaacgaccagatcagccgcaacattgagctgacaaataagcttatccttcccttcaaaaataagaccgttatagagaccaccatcgacaacgcattaagcgccgacatcgatgagtgtattgtggtactcgggcactatgcgaatgagatcctagaaagcatttttgacaattacaaggattcggtcaagtttgtgatcaataaccctgtggatgtcgggttgagcgtcagcctgtacaacggtctctccaacataagtagcgatttcgccctctgcataacagcagaccaaccgacggtgtccaccgagactttcaaccgtatgatcgaagccagtcagaactccaagaatccaaacaggacaattagcatcctccgaagacgcaagattggcctcctggatagtgctgaaggactaggcatgccatttgtggcccatcggctgaacctgatgaactatttggaaaacgaagacgacaacataaatcccatccttagaaaaatcttcaacgacgggtacactttctacggaatcaaggagaaaaataagaaagagctgctgaatattaattactatgatgactacctggccctgctggactga

SEQ ID NO: 9460 - DNA, 675 bp, synthetic construct
  source 1..675: mol_type = other DNA
atgacgaacctggagaagaacaagaagtactgcgaagtgatcgagagtaagatcaagctggacgcgaaacccgtagcaatgaagctcataaaaaccgaggatgacttgccagagggcattgacttaatcgatgagaagattcgacattgcgagatggtgagaaaagctagccttggaaacactttttactccacaatcgatcagcagctgtgtttggggggagccggagccattggcctgagggacatgcctgagaaactggcaaacggcgaaaagtacttcagccttggccgcttccaggatctggagaccgctaagaagctgacttccaaactctcaatcgtgaaggacatccactggggaatgatatacgcgccgctggatgaagccgactttgaagccgatgtcatccagatcataaccgaacccgtcggcggaatgaaactggcccaaagtattgtctataagacaggtgaaaaaattaaccccagctttgcagggattcagtcgctctgtggcgacgccttcgctgacccatatatcacaaatggggttaatttcacgctagggtgcgacggctcacggaaagcagccgacataaaggataatgagatgaccgtggggatctccaaggctaaaatcgaggaggtgatttctggtctcgaaagcatctga

SEQ ID NO: 9461 - DNA, 1236 bp, synthetic construct
  source 1..1236: mol_type = other DNA
ttgaagttgccctcacgctcaaagtcctacatgatcccagagtacagtgtaacgggtgacttactgtcatacctcacgtgcaacctgcagtacaggtaccaaaataaaggcacactacccccgagcaaaccggtccagcgctggtttggggaatttattcatggcgtaatcgaagaagcgtacatccaatgggagcagaacaacatgcactttccttgggactggaaaaaggatatccgacccatcgaggacctgattgatttgaggctccaggtgagaggcctttacccattcgacgaggatctcttcttcagcattcacaatcaatcggacgaagaactgacaatcgatgatctgaatgagcacgaccataagaagctggcttccgcccgggccgagaaggcaataaacatttggggaaaggacctgttcccactgatcgacgcatctgagcacctgataaagggcatacgtgatatgcccaactatgatgaaaacaccagtcggagtaattactatggcattaatggtgtggtggatgtctcctcctctgtgaaaatcaataagaccctcgagcagagcaactttgacaactataacaacagaattatcgaatacctgaagaaggatgagaacttccagaaacgcatcgcgaagttcgacaaggacgacgagtatgagatacttattgattacaaagggatgaaaagaccccctgaaaaagtcaacaatcctaaggtggaaaataaatgggaaactcacgagcagcagatattaacctacagctggcttaggtcagagcagaaatcctctaagccaatcatcgccgggatcattttttacctgaacgagctggtgccaagcaaagaggacttgattctaatcaaagatgaactgaacaatggactcactgatattggatatgagtatgataaagacattgagctcatcaatagctggcaggaggatgataaggctcctgagctgagtgacaacttcaagatcgacaggtccatccgaattataaacgtcgacgaatatgaacgggagaaagcccttctgaaattcgatagtgtggttagcaatatcgaagagtccctcatcaaggagatgaagggatgcaagattcaggacgcctggaaaggggactcggacgagcggacctgcagcgcttgtgactttaagaccttctgtaagaataacagcgttaagacaaaggacttcaagatcccctga

SEQ ID NO: 9462 - DNA, 2439 bp, synthetic construct
  source 1..2439: mol_type = other DNA
atgatttcctacgaagaatttgaggacatggtggtgaatatactgaaaagagatatttcgtccaataaagagcagaagaacgccatcctggctccttgcaataagagcctcttccttgtggcaggcccagggagcggaaaaaccactgtaatggtgctgaaaatactgaaatacatctttgtcgatgacattgaaccaaacgaaatcatagctaccaccttcactcgcaaggccgctgacgagttgtattcacgaatcctgggatggggcgatatgatcaaaaatcaccttctcaacactattcacgatttcaacaatatcaccaagatcacaagaattgatttcaatcaaataaaaataggtactacagacagcatcgcggaagagttgctgagggagtataaaaaacccggggaaaatcaggcaatcgtgattgaagggtttgtcgctaactccgccatgataaaaatcattatcgaggacgaaaaatatctcaataaaaatctcgtagagtatctcaaggaagtgagcggcaaggagaagatcgaggaaccctctaagctctcggaaatcctaattgagatcaagaaccggatctactacgatcaggtcgatttcaacgagctgtacaataaaacccaaaaggatagtggagcacgcatcgcccttgactgcataaaaaagtatgaggacaagcttcagaaccggaacaccattgatttcgcgatgctagagtcagagtttcttaagaagctgaagaacaacgaactggagacatttctgaacgagaccaaaattgtgctaatcgacgagtatcaggacactaacctgcttcaagaagacatttacttcacgatagcccgctccgcgatcgctaataacggcaacatcacggtagtcggtgatgacgaccagtcactgtaccggtttcgcggcgccaccgtggacctcttcacaacgtaccaggaacgcatcaatgaaaaactagggatcgaggttgaggagatcaacctgaggaccaattatagatccaccgaaaatatcatcgagcactgcaatcagtttgccgagttggatagtgagtaccagaatgcccgggtggaaaataagcccaaaatcattgcccccgacttcgacaatgacaagatgcccattttaggcatgttcaggaacaacccagaaatgctggcgaaggatttatccaagctcatcaaccagctcgtcaacaagggggaagctgagattaaggttctgcaggttttgaataaggagtattacgaaaaggtaaacggtgtgattgacatagcaaggctccagcagattaaagcggagaatgtcaaggccggaaaggagattgaaaaaataacgctgaagctggacagcgactacggtagcgcatcggacattgccattttgtcatactcaccgaaggagacatattacggcaaccgtagcttcctgcattacctgcggaaaaatctcaagaagctgagacagccgattgaggtcttcaacccccgaggcatcgagcttcaagacattgatatcgtggggatcttttgtggtttaatgctcgaatgtattgatcctgatagtactgtgcagaaatctgataagaccatacctaagctcgcaacacacaacatgcggcgttggcgcatcaaggccaaggacttcatcaagttgaaccctgagcctcatgaaccaataacactctcccagttcgtgacctattggcagctgagaagaccccgggggcacgaagagtggcccaaaactgccagtttgatggagctggcatacaagatcacgacttggatcgaggaactgcaagaggacgtggaagggatcgtgtacctagaggctattacccagtccatcacccaaacaggattttttaacgactatcatagcaatatttctttccgaacccagaaacaggagcgcgagagcatacttgaagctatctggaacattttcattccgctgagcactggcggaatacagatcgatgagagccttctcgaaacactgcctgacaataggattaacgtcttgtccatccaccagtccaagggattagagtttccactggtgatcgttgatgtggggtctcggttcaagcagaacgacatcaggacgcagaaactgagattccccaaatcaattaaagaggagacaacactggaggataggatcaggcgatacagcaagatcggccaaagtaagcggggcgaaaaagacaagagctttgatgacctgaccagactgtactttgttgcctttagccgcgccgagaaggtcctgttgctcatcggcctcaaccctgctatcgaaggatataacaaaaagaacaatcatttcaacatcccaaacgtggccctgggctggagtcgagacgagaagtacatcggattcaacgagatttatctgatctga

SEQ ID NO: 9463 - DNA, 2871 bp, synthetic construct
  source 1..2871: mol_type = other DNA
atgtctgaagtaaacaacatagacatgttcaaaaatgacgtgcgctacagggagaacatcgcccatatcgagacaataccggctaaaaaggccagtttcaagaaagtcgataatctgaacgagaacattgtcaattacctctattcaaaagacgtgaaactttacaagcatcaggcagagacctatgaggctatcaagaatggtgaaaacgtcattatcaccacaccgaccgccagcggcaaaacgcttgcctttaacctacccataatggagactatgattgaagatgataatgctaccgctctttacatctaccctgcaaaagccctttccaatgatcagctgcacgtgctagagaacctggagaaggaactcgatatcactatcaacccgcgcacctacgacggagacactccaagaaacgagaagcggggcatcagggaaaaatccaggattgttctcaccaatccctatcagctccacctgattctgtcctggcaccatcagtggacacggttttataagaacctcagatatatcgtcatcgacgaatcccactattataagggagtctttgggagcaacgtgagcttccttattaaacgcttaaagagaatagctaacttttacggctcgtacccccagtttatcctctcctcggcaactctggccaacccattggaactggctaatagactgactgggcaggactttgtactggtggataacgacacaagccccagtggcgagaaggacttcatcctctataacccttttcaaaactacgttcgaaacaaggtgtatgcccagaacgccccctctgtgcacatggagactgaaaacatcttcatgtacctgatgctaaagaatatccagacattgtgcttcacagtttcaaggaagaccaccgaacttattgccatgtgggccaaaaaagatatgacgcaagtaaagggcaagctggcccaccggattgccgcatatagggcaggatatcagccgcaggagcgacgggagattgaggagggtctgaagagtggaaaatacctgggagtgacatgcacgaacgctttagaactgggaatcaacatcgggtccctcgatgccgtcatcattagcgggtaccctggcactatgattagcacctggcagcaaagcggcagggcaggtcggagtaatcaaaaaagcatcgcgatattgatcgcctttgagaatcagttggaccagtacttcatgaataatcccaagttcttcttcgacaaacctcacgagaatgccattattgacctcaccaacccaatattgcaggaagcccacttgctgtgtgctgccaaggagctgcccctgaagcggggagaggcagagaaatacttcgacatatctcaggatgtgatcgacgagcttgtcagcaaaaaggatctgtacgagaatcaccgtggagactttatgtacccttacgacgacaatcccgccatggatcatagcctggatcagattagctcagaggaatttaaagtcatggtgaatggccgcctcttagagacgatggaacgttcccaagtgtaccgcgaagcccatgagggagctatcctgatcaataagggcgacacctacgtcgtgaacagtgttaacctaaagaaaggttatgtgaacgtgagcaaggaagttgtagattaccataccatggtactcaataagacggagaccaacatcaagaagaagctgtcaaaaaccaagtatggggatctgaccattcatttcggggaactgactgtcagtgaggactacttcaagtacaagaagatgcactttagcaaacctatcggcacattcctgctcgacctgcccccccttacattcaacacaaaaggactgtggttcacaatcccaaaggaggttaaggacgcggtggaagacatgttcccaaacgatgaagaagtgtttgcgggcggcctgcatggtgcagagcacgcgctcattggcctattccccctgcacaccatgtgtgacagatttgacattggtggcctgtcaacaaattatcacgaagacacccaggaggctaccatctttatctatgatgggtatgaaggcggcattggaatcaccgaaaaagcagtcgatgtgttcgttgacctgctgaactccaccattgacctccttaacaattgcaaatgcaagaaaggttgtcctgcatgcatctactcgccaaaatgtggcaatgataataagccactccataagggggcaactaagtatatcctcgaatacatgaagaaactgatctcggatgaggtggatgggcaaaaggaggacattattgatgttcagtccactgtggacgacagcaaggagttcgaggaggcttaccagctctatgagaacggggattattctgcttcaaaggacatcttgaacaacatcctggccaacgataagaagcacgtcagatcactcgcccttatggcgcagatattgtacgatcaggatcaaaaggacatcgccctcctatttacgaaaaaggcgctggcaatcgaccgcagcaatgagatggctaacaacctcgaggtgttactgaccaataagagcaaaacgaaggagaaccactctgacctgagctcccttgacgacgtggatactctgttcgaggaagcctacgacatgtacagtcagggggatttggatgcgagcttgaacattttagaaaaactgctggacttcgacagtaaaaacgccgaaacgttggccctgatgggactgatacattaccactccgggtttttccctaaggctgtggagtactatcgaaaagccacaaagatcaataagaatggcgagatggtgaaagaattaaagatacgggtgtcctga

SEQ ID NO: 9464 - DNA, 1140 bp, synthetic construct
  source 1..1140: mol_type = other DNA
atgaattttaagtctaaatttggttttggatgtatgcgccttccaacaaccgacgagaacgatccatcctcaatcgaccaggatctgtttaacaagatggttgacatttacatggaaaaaggatataactacttcgatacctcttacgcttaccataacggtaagagcgaggtcgctatcagaaaagccctcgtcgaaagatacccccgcgagacattcaagatttgcgacaagatgcctacttgggcactcactaacagtgaggacaacgaaaaattcgtgaatgaaatgctggagaggctgggaatcgattattttgacgtatttttcatacacaacatcaacggcccctggctgaagaatgccaaaaatgcagataccttcgaatatgtgaaaaagatgaaggaaaacggcattgcccgggaaattggctttagctttcacgacaagtctgatctgttaaaagaggtcctggatgagtatggagacatctttgacatcgtgcagctggaactcaattacctggattgggaagacccggccattgaggctcataaatgttatgatctgtgcgtcgagcacgggctggacgtgtacgtgatggagcccctcaaggggggggtgatcgtcaatccaaacgatgagatcaaaaacgatttcaaggagttcaatcctaacaagtccatagccagtttcgccatacgattctgcgcgtcattggagcacgttaaaatggtgttatccggcatgagcaagatggaggacctccttgacaattgcgatacctacgagaacttcaagccgttgaatagggaagagaacgagtttctggagaagatggctcagaagctgagcgacaatcttgcggtatcgtgcagcgagtgcggctattgtgttgacgcatgtccagagatgatccctatccccgaatacttcaacctatacaacacaagtaagaaccagccagaatccaatatctaccggctgtacttcgacaaactaggggatgaaaaagtgcctgccgacgagtgcacgtattgtgggacgtgtctcgactactgcacccagaagattgacattcccgaagagttggagaaggtggtggaacacttccaagagggcttcagcccctatgaatga

SEQ ID NO: 9465 - DNA, 378 bp, synthetic construct
  source 1..378: mol_type = other DNA
atgcatgagctcagcatggcccagggcattataaatgcagtgctggacaccgcaaaggaaaataacgcgacggaggttaacaaggtgacaatcgaggtcgggcggctggccatgatcaacccggagcagctgcaattcatcctaggtgtcctgattgaaaacaccataatggaggatgccgaaatcaacttcgaggaagtgcccgtggagatgaagtgttttgattgcgacttccacggcaacgctgtactcgatgacagcgaccactacgctccacttgtgaaatgccctaagtgcaattccctgaaaatcgacatcttgaacggaaaggatatcatcgtcaaaaatattgtgattgaaaaacccgacgacgcctga

SEQ ID NO: 9466 - DNA, 651 bp, synthetic construct
  source 1..651: mol_type = other DNA
atgcaccaggtggctgacgtagaagttgccaagaatatcatggatgctaataaacggttagctgacaaaaaccttaaaaatctggaggacaagaacatattctgcgtggattttgtcggcgcaatcgggagcgggaagacaacccttgtggaggacatcattgacaacacagattacaagattggcgtcctagcaggcgatgtgatctcaaagttcgacgcgggacgcatagaaaagcacaacgtccccgtagttggcctgaacaccgggaaggaatgtcacttggacgcccatttggtcggccacggactcgcagatctgccgctggatgatctggacatggtgatcatcgagaacgtgggtaatctgatttgccccgtagactttgagctgggttcccatctcaggattgtggtggtgagtgtgacggagggggacgatactgtcgagaaacacccaatcatcttccagacttcggacgtggttgttatcaacaaaattgacctggcggatgccgtgggagctgacgccgataagatggtcgccgacgcccaaaaactcaatcctaagatcaagataatcaaatccagcctgaaggaaggcaagggactcgacgagatcattagcaccattgaggaagccatgaactga

SEQ ID NO: 9467 - DNA, 1032 bp, synthetic construct
  source 1..1032: mol_type = other DNA
atgaaagtctggatagatattagtaacgccccccatgttcggttctttaagaacgtgataaagtatctagaggccgaaggcgaggatgtcatcgtaaccgcaaggcagtttggggatatccataagctcatggaaatgtatgacattgatttcatctctgtcggtaagcatggcgtaagcctgtatgataagcttaaggagagcacttccagagtgtacaatttggtggacgtgatccacgacgaaaacgtggatgtcgcacttagcaagcactcaattgagctgcccagaatcagttttggcctgggaatcccaagtctgtacgtgcttgacaatgagcacgccctggctgctaacaaactcaccctgcctctgtgcgatcgcatcatcacaccaaaaattattgacatgtggaagctcatgaaattcggtgcggaccccaacaccattatctcgtatgacggcacaagcgaactcatgcatttcaaagatttcaagtacaatgacaacatattcgacgatttaaatctaaatttgacgcaccctaaaaccatcttgatgcggcccgaaccctccctcgcatcctacttggatgccgattgccgcaagtcagtgctgtccccaatagttgacgagctgaaaaatgtagccaatattctcattcttccacggttcaaggaacaggctgagatctttgagggaattgaaggggtgtctatcctgaaaccgcctgtcgacacctcaaacatcatcaagaagtgcgacctggtgattggcgcgggaggaacaatgaaccgtgaggccgcaatactgcagacgccggtgatctcctgttaccccggcaagacactcagcgtggaccagtactacatcaacaaggggttaatgtaccgaagccaggatactgacgaggttatccacaaagccctggagtttatcgtgaatcctcacgagaggattgacgtcaagactgacgacctcttccaaatcattatagataacctgtatgacctggctaaaaacgggaaatga

SEQ ID NO: 9468 - DNA, 1083 bp, synthetic construct
  source 1..1083: mol_type = other DNA
atgctgctgatagctcagaaccacctccaactgattctcgaggttgggctgatgttgttcgtcacactggtcttctgcctgaacctgatccccctgagccttagtatcgtgaccttcttgtcattgttcataatgggcggactcaccctgctgtttggagcggatattgctctgcttgtgttattttccagtcaagcggaatttactcacccatttggcccaattgccctcctgggtgctgtaactgctctggcctcgctgaaggtcatgtccgaatctggtgttgacatccggccactgagacgatttgtgattttgttcctagccggaatcacagtgttcggaggcttaatgcacagatccttcctaatcctctggctactcggcttattcctcggctacctgatgatctccaagtctttccgggaaaaaagcgtgtttaccctcaagaggatcatgatgtttttcggtgccgccggcgccgggttcatcttccttgaagttcttgcgcgagtcagcggcatgaccatcttcagcccgctgctgcgcctggggagaatcgagcagtacagcctctcgagtattaagatggtcctgaacaacattcagctgatcgggcataacgccaatgcttcttattggggcgccgatggcacggcctttgccgagggatatattactctccccatgcagcttatcctgttcttcggactgcctttccctctattctttggtgtgctcgtgaaccagaaagacaccattgactatatgcttcccgggatctttggctggggcttcgactttggaatactggggctcattgggctgatgatatttgtacttggcacaatcatcatcggatttaaggtgctcaatatgtaccgcgagaaacgggagaagaataataagaaatacttgggcagggaggtgctccttacgggggcactggccgcattctgtgcacagagcttaattggactgttcatatttaaccgctccatcaacggtatggcattgctgacattcttgtttgtgggggcactcattctggctaatgtggtcagcttgaaatcaaggtcatga

SEQ ID NO: 9469 - DNA, 459 bp, synthetic construct
  source 1..459: mol_type = other DNA
atgaaggctctcatcctgctgggatgccccgagactcctgcccagaccccaatggcagtgtacgtctttaacaagctgacgaagatgggctacgatactaccatcgcagctaaccccgccgcctccaaactcgtcaaaataagcgaccccgaggggctctacaatcttaacttaatcgatttggaacgcacactgggggagattaacgagggcgactatgacctgctggttggattcgtacacaaagacgcggcagcctcctttttcgtgacattcgaccagattctaaataccaaaagcattgcgcttgtcttctcacgggatgctgacgaagtggccgagtttgtgaatatgatcgaagaaagtggcagcaaggctctgatatctgccgtgagggcattccataacccatcgccgatcaaggtgaaattcgataaggccatcaaggagtttgagtga

SEQ ID NO: 9470 - DNA, 315 bp, synthetic construct
  source 1..315: mol_type = other DNA
atgagtttctgcctagatacttacctgcagcagagcgacgattacgagatacatgccagcaaagcagggtttaaggattgtgccatgattatcaggttcaaggctgatgacctggtgtatgtgaagcccggcgacgaggtgctcggcgtgcgcgtcatcggtattcctccaattccaatcggatttgaccacaacaagggaaccgtattcatcccctacaccaaaccctgccacggcacatccgttgtcgagctcccgataaacgaagaggaaatcgaaaaaatccggaaactggacacggggaataagaagtga

SEQ ID NO: 9471 - DNA, 945 bp, synthetic construct
  source 1..945: mol_type = other DNA
atgaaaagcaccgtggtcggcagtttccccgctaaggaaagctccccaagcaattttaaagataagatattaaatacactgggactgtatgaccctttccgcgaggcaatcagatcgagcgtgattgctcagcttgacgcgggggtggacatcatctccgacggtcaggtcaggggagacatggtttctatcttcacaaaatacattccaggaatgaagatcgaggatggcaacaccgtgatcgtgagcaagatacggaatccgatcaaggagatctccattaaggatatgcaatacgccaaaaaggtcatgaaagagtattacaatggcaacattcccgatggtaagggcatcaagggaatcatcaccggccccaataccatagtccacagctcaagaatcgaaagcttttataaaaacaaggaggacgcaatcattgacctggcacatagtctaaagttcgaagtcgattctatcgccaaaaaagtagagcctgtgtacatacagatcgacgaaccatttctttccacgggcatggtggacatgaatacagctcgcgaagcgattgacataatccacgatggtctcgacatccctctcggaatgcacgtctgcgggattctgtctaacgccttcaaggacctggccaaatttaacattgatattctggatatggagtttgccggaaacaacataaacttgggggtgctggagaagaacgcatccctcctcactaataagaaggtgggcttcggctgtattgattcatcggtgcatactgtggatgacatcggggacattgacatgctagtaagtagggccattgagatcgttgggaaggacaacctgctgctggacccggactgcgggcttcggcgatcacccaaggatgttgctttcgaaaaattgaagctcatgaacgagatcaaagataaatacgcctga

SEQ ID NO: 9472 - DNA, 432 bp, synthetic construct
  source 1..432: mol_type = other DNA
atgtatttcggattttcattcatcgggctgctcttcctaatcatgctgttcattccaaatgtgctgtggaataagttccagccaaccgattacgagaagtacagcaaacgggagaacatcattctactggcttttgaacgcgtcggccaggtgttggtgtgcatattttccctcttttgcggcgttaattttaacctgtcgatctgcgtggcaatcccgttcatcatcctgatattatatgagttttactggattaagtatttcaaaagcaacaagaccatgggagacatgtacagtgacttcctcaaaatccctctccccggcgccacactgcccgtgcttgcctttgtcttcctcgggatttgtagcgacaacatacttctgattttctccacgatcatctgggaactggtcatcttggtattcatttga

SEQ ID NO: 9473 - DNA, 732 bp, synthetic construct
  source 1..732: mol_type = other DNA
atgaagttcctcgtaatcaatggcagccctcgcaagcagaacacgtacaacgtgattaagcaggccaaggtcaatctgaacggtgacttcgaggaaatcaacctgattaaggagaacatccccatgtgtaacggctgctttaagtgtatccttgaaagtgagacagagtgcccccactacgataaaatcgacccaatcatcgagaagctccacgaatgcgacggactgattattgggagccccgtctatgcgatgaacgttaccggacttctgaaaaacttctttgaccacaccgcctacttgtaccatcggcctgagttctttactaaaaaagctctggtggttgtgaccacagctggtgcagggcataagaaggtcgcgaagtacattgatgaaaccttgaggcattggggagtaaacaaggtgtataaaatatcgttcgcttgcggcgggaatgatagcctggacaatgacaaggttaataaagtgagtcaaaagttcgccttcgatctcatatccaacaaattacactctcccaagttcacagatatcatcttttacaatgtgtggagagccatggccctatcaaaagacccaataaaggcagataaggagtattggttcaatactggcctggtgaaccacgacttttccccggaagtcaagctcaatatcccaaaaattgtgttcgcaaaaattgtctttaacgtgctgaagaaagccatcaaatga

SEQ ID NO: 9474 - DNA, 1029 bp, synthetic construct
  source 1..1029: mol_type = other DNA
atggtcctgcgggaaaaccgcattttttacctggatgagctaagagctattgccatcctgtgcgtcatattcgctcacaccatccaaaactttcccactaacatggactaccttacatcccccacccttctttcttacctcacagtggcccggatgggcgttattctctttttcatgatctcaggggctctgctgattggcagggaatataacctctcggatttcctgaagcgacgcttcgccagagtcttaatccccaccatcttttggcagatcatcggatatctgagcgtgctcatctttatcggatttacgtacgacaatctggtgcaggcaagtgtgcaggtggggtttccgtggttcgtctgtgcaattctcgggatctatttcgtgatccccatatttaactccttcatcaaggaatatgggattaaaggtgcggagtacttcttgatcatctgggtgttcctcgtaatactgaccaacatgcagctaaatgagacatactacattgacttcatattcaacaacgtcggaatctatatcggatatgccgtgttgggctattacctggccaataaagagttcaacatatactcttttcctatggttgtaatatgcagtgtgcttttcatcatttcgctggctctgaacagctactacgccttcaatttttcccatgtcttttacatagagtcctatagcatcatcgtgcagtgtgctctcttgttcctgatcttgaggtatatgagtaagctggccaagttccgtccaaagttcgttttaagcaaactacactcatttgtgcaaaattcatttattggcagctttatctactatctttccattttctccttcacgatttacctgatgcacggcttcatcgtcaatgccattattaaatacatgccagtgactcagttcagcatgattccagcaatctttctcctgatagcggtaatctctattgttatcgccgcagtgctcagtaagatgcctatcatcagcaagctgtgcggtatttactga

SEQ ID NO: 9475 - DNA, 753 bp, synthetic construct
  source 1..753: mol_type = other DNA
atgaagggcaaggtgatcttcatcggtgcggggcccggagatcctgagctgataactgttaagggcaggaatgtcatagagaaagctgacgtaattatctatgccgggagccttgtcaaccccgatgtgttatcacccgctcgcgaggactgtgagattcataatagcgcctacttgaatttggacgagacagacgccatcattaccaaagcagtggacgaaggaaagctcgtcgctcgggtgcacaccggcgaccccagcatctacggcgccatcgctgagcagatccgggaacttaaaaagcacgatatcgagtacgagattatccctggagtgtcgtccctgttcgggactgccagtgtcctcgaggcagaactcaccctgccggaaatctcacagtccgtgatcatcacccgacccgaaggacgcaccccaaagccagacggcgaaagcctggccagtttctccaaacaccacgcaacgatgtgcatctttctgggtattgggatgattgataaggtggtggatgagctgctggtagggtatgagaaaactacaccgattgctgttgtgaagaaggccacgtggccagaccagcagataatcaaaggcaccctcgaggatattgcacaaaaagtcaaggacgccaacattacaaagacagccatgatcatagtgggcgatgttctggaccctggagattttaacgcgtctaagctatatgacaaaaacttcaagcatgaatacagatga

SEQ ID NO: 9476 - DNA, 396 bp, synthetic construct
  source 1..396: mol_type = other DNA
atgaacgataggggcttcgtcagcgtggagtacatattcacattattcatactcttcaccatcggctgtggtcttctcttttactccagcagtctgattaacagcagtatcaacatcgaagacagtgtctctcaccggatcattctaaacgacgtgagctgcgtaatcagccaggtcaattcaaatggcgtggggtactccaaatacatcaagctgccatcggacaagggctattttgagattaccgttgataagtccaagctgacaatcgaatacgacaataagaaaggggagactatgctgcccctcttgaacatggactccaagtataagctgatcagcgggcgcggatactatatttcaaaaagcgatgatggaaaaattgtgataacgtga

SEQ ID NO: 9477 - DNA, 498 bp, synthetic construct
  source 1..498: mol_type = other DNA
atgacaggcgacaacggacagattagcgccgagctgctcttcctgtttggaacactcatcatcgtgttaatgatctccattgtgttcattagcgacgagaacgaactcaacatcgccatggcggccgcacacagcggtgtgatagaggggctggctactagctcaagcggcatctaccccgcagacgcttacagtgattattccaattcgaaaatgaatgtcttggaaccgtactccgttgagatcgtgaatattagctataccgagcttggcggggacaacaactacgataagaagcaaatccagttcaaagtctacgcgaaaaccagcgaccgcttcaataacaaggaactaactagtattggggataggataaattacaacctgcggaagtccatagccgttagttttaactcaatcaatgccaccaataagctgtataacccagtctttagccctcattatgtgtacacgaccgctaacgtgaaatgggtatga

SEQ ID NO: 9478 - DNA, 396 bp, synthetic construct
  source 1..396: mol_type = other DNA
atgggtatcaacacgtatattgacttcatgtacagcgaggatgaaaagaagcagctgatggaagacttaaaagagatggagacttttaaggtggataccggcgacgaaggcaaaatactgcagaacgacttggaggagtactttatcaatggaaatggggatagggaggaccttacattcagaattgaactgtacttctatgcctttaagatattctgccgcaagcccgtggtcattgatcgaaaccaattcacaatctttttcaacgactccctcctggactggaacctcatcaaactgattatggatgatcttagcgactttgaactggaaatcgaggcagtaaaagaggagcgggacgtgctcatcaacctgaatttcaccctacactactga

SEQ ID NO: 9479 - DNA, 762 bp, synthetic construct
  source 1..762: mol_type = other DNA
atgattgacacacattgccacattgattttgaagactttgacgatgacagggacgaggttatcaaacgggccaaagataaattagacaacgtcatcgtgtccgggtactccaatgacagcaacatggacgtgttgaagctttcaaaagactatgaggggttcatctatccaactttcggcttccaccccgtcagtagccaaaacgcaacagatgatgagataaagactgcccacgaaaacatcgtagagcatctggatgacatcgtagccattggggaggtgggaatggactacttctacgtcaccgacaactcgctccgcaagagacagcagaagatattcaccggatttctggaactagccaatgagtacaaaaagccaatcgtcatgcatgtgagggattgtgagaaaaaggcggttaacatcatctatgagtatgaagatatcccttactttgtgtttcactgctacggcggttccctgaagacggcaaagcggatcatgaacatggacaacgcctacatgagcttctcaaccatgctctgctactctaagcagcaccaggatctcattgagaagatcgacctggactatatcctgactgagacggacagtccctacctggcgatgacaaaagaagagcgaaatgaaccggctaatgtggtgaatgcagtgtataagatagccgaaattaagaatatggatatcggcaccgtggatgagataaccacaagcaacgcttgtaacattttcaaaatttga

SEQ ID NO: 9480 - DNA, 765 bp, synthetic construct
  source 1..765: mol_type = other DNA
atggcagagaacatcttgtacagactgtatgagtggtacatctccaggaatctggtgcctgaaaagatgccaaagcacgtcgcctttattatggacggcaacagacgctacagcaaactgcagggcaacattgacgtggtgaaagggcacgaaatgggtgtgaatatcctggagaaagtgatggactggagtattgagctcggcatagagattatcaccgcgtatgctttctcaaccgagaatttcaatagatcaaagcacgaaatcgacgggctgatgaacctgttcgtcattaacttcaagcgcttagtggacaacccgaaaatccataagtatgaagtcaaagttaaagtcgtaggccgcacagagctcttgcccgacaacgtgaaggaggccataaaggaggcagaggatgctacagcgcagtataacaagcggttcctcaacttggccattgggtacgacggacggctggaaatcatcgacagctttaaaaagatcatcaaggacgtgcaggacggaaagatatctattgatgatgtggatgaggagcttgtaagcaagaatctctatacggccggacttgatgatccaaatctaatcatcaggaccagcggggaggagcgactgagtggctttctactgtggcaatcttcgtactccgaactgtacttctgcgaaactctctggcccgaacttcggaaagttgatttcataagggccatccgttcctaccaggcacgagaacggaggtttggtgcctga

SEQ ID NO: 9481 - DNA, 717 bp, synthetic construct
  source 1..717: mol_type = other DNA
atgaaaaccatagccattggtgtaggaaagaatgagaatatcatccaagcgtgtcacatctttaaggagaaacacccgaagacggatttgaaactcatctaccgggatgaagacctggtgcgggcagtgcttgataataagatacatggggtggtgcgcgggagtctgccagcttccaatatcatgagggaactgaaggaaatctacccagagattacccgagccacttatgtcaacggcgacgaatacgaatttctcctgacacctgtgggaatcgacgagggcaactcggtagaggataagctgaatattgtcaagaactgcattgccttctacaagagactggggaagacgcccaagattgctgtcctggcagagggaagaaaggatgatttcggccgcggcgaagaagtgtcaaaatctatcaccgacagcgagaaactaacaaagctgatccaggagacaactggcgaggaggtcaaaaactattacattctcgttgagaaagctattaaagacgactgcaacatcattgttgcccccaacggcagggtgggtaacatcatctttaggacactggtgttattgaactcctggcccagctatggggcgattaccttcggaatggacaagatatacatcgacaccagccgtgaccagagtatcgaggggtatgtgcggtcccttatactcgccaatactctagacaacttctga

SEQ ID NO: 9482 - DNA, 1380 bp, synthetic construct
  source 1..1380: mol_type = other DNA
atgaaggcgattaacaagatgctatgtctggtggacggcgagcactacctccccgtaacccaacaggccatagatactctgaacaacttggagcatattgatgttgcgggggctgtattcatcggaggaactgaaaagctgcgggacgattcggaggagacatacagccagaagctcggcgtgccagttcagtttgcagaggacaaagatattccctacgatatcatcgtcagcatgatcagacagtataatatcgacacagtcatggacctgagtgacgaaccaatcttggattatccgaagcggtttaagatagcttgcagtgtgctgaatgaaggcatcagctacgaggggccggatttcaagtttgaacctgtgtcccagtatgacatcatgaaaaagccctcaattactattctcggcacgggcaaacgcatcggcaagactgccgtgtccggcttcgtctctcgcctgattgacaaaaataattatgagccctgtgtgatcgctatgggtagaggcggacctagcgagcctgaaatagtccacggtgaagaactggagatcaccagcaagtttctcctagaacaatctgaaaaaggaatccacgccgcaagtgaccattgggaagacgcgctgatgtccaggatcttgaccatagggtgtcgccgttgcggcggtggaatggctggcgaggtattcttgaccaacatgaagaagggcgccaagctggccaatgaggtggattccaaactggcaatcttcgagggtagcggagctgcaataccccctatcaagacggacaagaagatcacactggtgggagccaaccagccaattgagaccgtgacagggtacttcggcccctacaggatctcacttggagatctcatcatccttacaatgtgcgaggagcctatggccagtaaggataaaatcgccaaaattgaggagttcatacaggaaattaatccagacgctccaatcatttcgaccgtctttaggcctaagccactggaggacatttctgggaagaacgttctgtttgccactaccgccccggagggggtgaaagacaagctcgtgcagtatctggagaagaactacaaatgcaaaatcattgggaccacctcccacctctctaaccgaccgcttttacgggaagatatgaagaagtatatggacaatgccgatgtgatgctctccgaactgaaagccgccgcggtggacgttgcaacaaaagacgcaataaatgctgggcttgacgtcgtgtactgcgacaacattcccattcccattaacgacacctaccccgatctgtcaaaaacgatcattaacttagtcaacagcgccatcgacaacttcgataatcaaatctga

SEQ ID NO: 9483 - DNA, 717 bp, synthetic construct
  source 1..717: mol_type = other DNA
atggacatcagcgaaatcaatctcgacgaaacgcatatcaggctcacaaccgatctgagttgtcacgacctgaaacggtacatcttcagcattcggagggatttaaaaaattatatcttcaagaatcaggagtttgccctgtcactggagccgatcaagtctgaagataaccttcctttgatcgtaaagacaatgattgatgcatccaacattgcggatgtcgggccaatggcttgtgtcgcaggtgccatatctcaactgtcgcttaactacctcattgagcaggacagcaagtactccatcgtggagaatggcggcgacatagccctgataaacgacagttcactattgtgcggaatttactccaataatcaggtgctgggcaacgacattgccttcaagatcaaaccccgcaagaaacccctggggatttgcaccagcagcggaaagattgggcactccataagcttcggcaaaagcgacagcgtcaccgttatctcgaagtcctccgccatctcagacggaatcgcgacccgagttgctaacgaagtgaacggcagcaacagtgaggagaaagtgagcaagggtctggaatgcggggaggattatagtgagttttttgacgggctactcataatctcagaaaacaacgtgggaactgtgggcagactcccaaaaatcattgagactaaggagttcgatgtcaagatcgtgtga

SEQ ID NO: 9484 - DNA, 288 bp, synthetic construct
  source 1..288: mol_type = other DNA
atgtacaaggacgagatgatccagctccaccagtttttggtctacgtgctgaaatacctggccgaggatgaccagatcacaaacgactgttccgaatatatatccctcaaaatcagcccacaccatattcataagacgaaggccgagcacaaacacgctattttcgtcctatgcaagattatcgcgcaagtggtggccgataaagagaacaatagcatccccgacaatgtgcgcaactcacttggcgatctggtaacccggtctcaggttgaactgagtgcaaagtga

SEQ ID NO: 9485 - DNA, 771 bp, synthetic construct
  source 1..771: mol_type = other DNA
ttgaaatccttcgaatttctcagcataaagagggagaagaagccccggacatccggtctgaccatggtgctggacaaggggctagggcttgagactgccagcagcctgatggatatttcaggagaatacgtggactacctcaagttcggatggggcacctccatcgtccacgaacaggacatcatcaaatcgaaggtggaaatgtataagagccacaatattaccccctacactggcggaaccctgttcgagcttgcttatacaaaagataagctcgaggagtttttcgacgaagcccacaacttagggttcccagccattgaggtcagtgacggcagcacagacatcccgcatgagaacaaattggagtgcatcgagaaggcaaaagaatcagggtttgaagtgctgagcgaaattggtaagaaaaacccaatcctggataaggagttgagcatcgacgagaggatctctaacatggccgatgagcttaacgccgggtcctcactgataattgtagaggcgcgcgagggcggcaagaatattggaatatttgatagtaaaggcaatgctaaagaagacgagatcgacacgatcctaaacagcatcaagggcgaaaagatcctgtgggaagcacctaataaaaaccagcaagtgtttttcattctgaagctgggaaatacggttaacctcggaaacatatcgagtgatgagatcacatccctggagactctcagacggggtctccgaggcgacaccttcgggaaactgtga

SEQ ID NO: 9486 - DNA, 1254 bp, synthetic construct
  source 1..1254: mol_type = other DNA
ctgaagaacaatcgaacaatcggggaaattaacgagaaaatcaccaacggcgaggcgaatatttacaccgcagaagaatttaaaaaactcataaagaatgacgagacacccagtttcaatgaagttgatgtcgtgacctgcggcacttgtggggtaatgtcggggacagctgctatcctgaacttcgtcgtgtccgaacccgggaagtttatacgggcaaacgaggtgtatttgaacggagtgcccgcgtacgccggcccgtgtccaaatgagtggctgggttctgtggacgtgattattcacggaactgcccattccattcacaacgaaaactacggtggcggattcctgttcaaagacatactcgaaggcaaagaaatcgacgtgagggtagagtcagccgacggcaagacaatcaataatactatcacgaaggaggatattataagagcgcagattattggcactagaatggccttcaagaactacaccgcctttaccaacccaaataaggaggacattagctcaatcttcgctgcaaagcctctgggtggaaacttgagtgggctgaccttcagcggctgcggtgatctgaaccctcttcagaacgacgtgcctcagaacgttataaaagagggaacgaaaatccttatcaacggaacccaggggtatgtccttgggaacggaacacggagctccgctgagaagcccaatctcatgttgaccgccgacctgatgcaaatggatagctactatatcggcggtttcaagaccggccagggcggggaagtttatgatacagtggccatccccatccccgtcctgaatgaggagatctataacaacttactaatcactgatgacaagatcagcattacggtatccgacatcaaaggccgacacctgccgctaacggagaccaactacgccaagctgtggggtgaatacagcttaagaccacaatacgaccgcgccaattgctacaagtgtgattcatgcactgtggaggaggtctgcccaaccaacgcatttgcaaacgaacggttggatctcacccactgtttcggatgcggcatgtgtgccaactattgccgccatgatgcttttgacatgaacatggggagtgtcgacctgacaatcgacaatgaggacgtgaatattcctatcatctgccgccagtctgataggctcaggggaaataagctttccctgaagctgaagaaactcatacagaatcaggagtttaaactctga

SEQ ID NO: 9487 - DNA, 609 bp, synthetic construct
  source 1..609: mol_type = other DNA
atgcagaaaattacggattcccccatcgactttgctgaagagatcatcgaagacgtcaagaactctaaggaggaaggcgtgctgaaatgtgtgcaatgcggaatgtgcacttcaacatgccctgcggccctacacagcgactacaaccctcgagacataatcgaacgcgtgctggacggtgatgtgagcatcattgaggacgattgtatctggaactgcttttactgttatacctgccatagcgtctgccccgttggcaatagtgtatgtgaggtgaaccagatcctcaagcagtttgcaattaaaaacgagatcgggcacgataaactttacgagtacatggggttcgccgattcctatttcactgccgctattggcgcaattccagaaatattcttcaaggatatcgatcgcgacgtgccaggatggtgggactttcggctccacctcgacgagatccggaaggagttggacctgaatcccccactgatgccgagcaaagaggttattgacgaagtctcaaagatcctgaccatcaccgggttcaaggacaagattgaaaccataaggtcgacacaggaggataagaacgagagtaattccagatga

SEQ ID NO: 9488 - DNA, 942 bp, synthetic construct
  source 1..942: mol_type = other DNA
atgaaagtaattcccgatagcgatattctcctgttccggagctgtctggtgagtgtggagtacccagggatagaaagctccacaaagtttgtgtttgacaagctgggaatcgattacgccatctcagaaaaccaaacctgctgcacagggctcgggcactactccgacgtgttcgatcagattgacaccacggcgatcggagcccggaatttcaagatcgccggtaatctggggcggaaaaatctggtgatgatgtgtgccacatgttatgcaattaataagaagtcggttaaactgctcaacaaaaaggacgacctgagaaaccatattaacaagctatttgacgataatgacttgagccacttaaagtacgagaaggatgacctgaacccaaccgagaacatcttccacgtcgtggacattttgtacggcaaaaaggacgagattaaagataacatcaagtatgacctaagtgattacgcaatcgcaacccaccatggatgtcattactgcaaagtccactacgaggatactattggaggtgtgagggaccctaatatccttgacgaactgatcgaagcatgcggctgtaatacgatcggttggtatgactacaaacgtgctacctgcgggactggatttcgccagcgatattccaaccccgatctgtcatttacagccactgcggacaagatgaacagcatagacgacgagaacgtggacattcttgttcacctctgcccgaactgccacatccagttcgataggtatcagcatctcatcggcgaacgcgagggccgcaagttcagagccatacatttgaatatcgctcagttcatcgccctggctatgggcggcgatttcgataaggtcataggcgtgaaagctcacaccgtacccatagacagcgtcatcaaagagcttaaggaggtcaacaagtga

SEQ ID NO: 9489 - DNA, 2310 bp, synthetic construct
  source 1..2310: mol_type = other DNA
atgagggataacttgaaaattggggtgtttctctgcgagtgcgggggaaatattgccgatacgattgatctggacgaggtaagggatgcactggatgtggaatttatcggacagttcgagaatctgtgttcacttaacggacggaagatcattcgggacgccatcttcgaccatgatctggaccgggttgtcgtggcagcctgttcgcctattagccatgagaagaccttccaggactacatcaagccattgaacccctacctgatggacatggcaaatatacgagagcagtgcagctgggtccatagcgacaacgaaaaagcaacgcacaaggctattaccctgataaacgcctccatcgagaaggtgaaacagtctgacgccgtagatcccatttactgccagactcctgacgaggttgccgtgatcggcgggggcatagctggaatgaacgcaacgctttctctcgccaagcagggcaccaaggtgaccctgatcgaacaatccccttcgatcggcgggcatatggctaaaattgggaaggtctttagccctgtgaagatcgcagaagaatgcggcatgtgtctgttgaatccgatccttaacgaactcgtgtggaacgaaaatatcgaggtgctaacaaacaccaaggttattgaagctgagagacgggccggcacgtacaacctaatactggagcgctccccccgctatgttgatactgaaaaatgtattgcttgcgggaattgcgcggaggtgtgtgaagttgaagtgccaaatgactggaacgataacctgtctttaagaaaagccatctacaggcccttcggacagtcctatcctgaagcgtatgtaattgacatggagaactgtagcaaatgtggagactgttttagagagtgcaccatgaaagctatcagactgaagggcaagcccgaaaggataccgctccaggtcgggagcgttatcgtggccacaggccacaagcttttcgacatggagaaacggcccgagtacggctacacccgttatgacgacgtcataacacagtctgagcttggccgtattactggtgttaacggcccaaccaaagggaagctcctcaagtcaaatggggaagtgccaaaacgcgtggtgatgattcaatgcgtgggtagtcgcgatgagaaaccagagggccacagatattgtagcaaaatctgctgtaccatagctctaaagaatgccaacatcattaagcacaaataccccgacacggacgtgctgatttgttacaccgacgtgagaacccccggcatgttcgagaagtattacaagcacacccaggaaaatgaggtgaggtttatccgaggacggcccggggaagtagtgaaaaagggcgataacttcatcgtccgaacagaggatacaattaagggggagtttgtcgagatcgaagccgacatggtagtgctcagtactgctatggaaccaagcgagggcacaatcgaaattgctgaaatcctgaacgtgggtacgactgaggatggcttcattaaagaatcacaccctaagatcaagcctgtcgcgaccgacgttcagggcatcttcgtctgcggaaccgcacaagatccgaaggacatcactgactcaattatgcaggcaaccgccgccgcatcaaaggtgaacgaatacaactacggtggagtggaaatcgagcctttcatcgccgaaatcgacactgagaagtgcatagtctgtggggactgtatcgagcgctgcaaatataagtccatgagcatacagaacgatgagatctatatcgatccgatgagttgcactgggtgcggaaagtgcctggtgggatgcaatcagagggccatcacagtgaatgggaacatcgatgagaagatcatgtccacaataaaaggcgtcttgtccaagaaacaggagggtcaacggacaatactcgtctttttggataacattggttataccgccgcggacaatatcggcgtgaatcgactgtcctaccccgagagtatccacattatcaaggtgatcagcgtcaaccgggtcaggccacgccacattcagtatgccctggagaatggtgctgatggtgtttttattggcgaatttcccggagacttaatgtacgatgaggtggagcgtaaaatccaaagggtcaaagaccgcatctatgagatgggtgaaaatcccgagagagtaacattcagcaaggtttacattccatacttcagtggactcgcgcgcaaattcgtggatttcgacaagaagattgaggagctggacgaggccgagctgtga

SEQ ID NO: 9490 - DNA, 570 bp, synthetic construct
  source 1..570: mol_type = other DNA
gtgtattacttgaaactgagcattggtgacaacatggcccggagagaggctatcgaaaacatcattaactgtatcgacgacgaactggtcgtttgcaatattggatttccaagccgggagctctatgacatcaaggataggaaggagaacttctatatgatcggctccatgggattggcctcatcaatcggacttgggctggccttagcacagcctaaccgcaacatcgttgtcattgacggggacggcgcccttctgatgaatatggggtccctggtaaccatatttgccaacaatcccaagaacctcacgtggatcgtcatagataatggggcatacggaagtactggtaatcaagatacctacgctcagaaactggacctcgtggacgtggcgcgaggcgtgggctttaagaatagttacgacttcgaagatattaacctaaaggagttcataaagtccgatgatgcgagcttcatcgtgtaccacacagaacccggcaacagcaaagctccgatcatcgacctgtcgccagtggagattaaaaataggttcatggatattgtgtga

SEQ ID NO: 9491 - DNA, 492 bp, synthetic construct
  source 1..492: mol_type = other DNA
atggactccagcgaggctatcttcgatggcctgaaagacgccggaatcaactttattgttagtgtgccctgcgtgaacctgtccaagttactcaacatgatcgacaaagacccggatatcatccatattccagtgactcgggaagaagaagggataggcatctgtgccggcgcatacctcggagggaagaaggccgccattttgatgcagaatagcgggcttggcaattcgattaacgccctgaaatccctcacggaactatatgagtttccccttctcatggtcatgagccacagggggaccgaaggagagaacatctgcggtcaggtcccaatgggtgagtcaacacccctgatattggaagcgatgaattacaagttcttcaagccaggcacccctgagggcgcatatgaggatgtcaaggaggcttgggagctgtctgtggaggagggaaaacctgtaagtgtgctgctggaaatcaagtactggtga

SEQ ID NO: 9492 - DNA, 1119 bp, synthetic construct
  source 1..1119: mol_type = other DNA
atgttcgaccgcctaccaatttcgagcaaaacagagaagattctgaccaagtccctggatgagcagataactgttggggaagccaattacctaatgaacatcaagggtgctgacctctaccctctgcttgcaactgcggactatttacggcagaaaatcgttggcgacaacgtcacattcattaataactgtaatatcaacttcaccaacatctgtaccgtgcgctgcggcttttgcgccttcggcaaggatgcagacaaccctgacgcgtacattctggacgacgaggccatccttaaaaaggctcagagcgctattaaaaaaggcgcccatgagttttgcgtaatgggcggggtcctgcctgacgccgatatcgaatattacgaacacctcatgcacctgctgaaggacgaatacccgaatgtgatgattcacggcttctcaccaacaatgatcgcggatgcatgcaaggtctccggcatcagtatcgctgagggctgcgaacggttgaaggatgccggtctcgatacattaccaggaaccgccgccgagatcctgaccgaccgttcacgagcattgatatgtcctgagaaggtgagtgtggacgagtggataaacatcatcaaaacagcccacgaggtcggaatccccggttctgcgactatcatgtatgggcacgtggagaccctggaagagcgcgtggaacatattgatataattcggaggatacaggaagagacccatggcttcacggaatttatccccatgactttcatgcacgaatattccccaatcttcctcgaggggcagagcaacctcggagccagtggaacccaggacctgaagctgtacgctgtaagcagacttatgctgagggacctcatcccgaatattcaagtctcctgggtgaaaatggggtacagatttgctcaagtggctctgacggcaggaaccaacgatcttgggggaacgctggggggcgatgagttgtcagaagcctctggcgcacccgatggagtggaggcctccatcgacacattgagcaggatggttaaggatctcggtagaaatcccattgagcgaaactctaagtatagcgagttttaccccattgagtga

SEQ ID NO: 9493 - DNA, 585 bp, synthetic construct
  source 1..585: mol_type = other DNA
atgaagaagtttattgtcattgacggactggacggcagcggcaaggatacgcaggtgaaattaatcgccgagatgtatgagaaacagggacggaatgtcgtgatcaggagccatccctgctttgacaataggtacggtcgcaaatcaaaggaagcactactgaagactgggaaaatcaatcacttgcttgccactgtttactttgggctcgacgcgatccgcagtgtggttaaatacacacacgatgataacgtggatgtcttgatcttctcccggtacattctcgccgtgatgtatctgccaaacgggataaataccatcgtgtataagatcgtggcattcattctccctacctccgattgtatgttcttcctggacgtaagtcccgaggagagcctgagaagaattggctcacgaaacgaaaacaccgagatgtttgagaacattgaatgcctgcggaagaaccgtctcaaaagccaaaagttcacatacaactggaacgtaataccgggcgacgactcggctgaggtcatctccgaaaagataaagatgaaatgcatcgaaaccgacaagcttctgaattga

SEQ ID NO: 9494 - DNA, 258 bp, synthetic construct
  source 1..258: mol_type = other DNA
atggataaggttctgcgggatatcctaaggaacaatcagtacttcgaagagataaatcccgaccgctacgtcccggaatttttgggcctcatcgtgaacggagtggtggtctatcacgtgaactggattgacatcattgagaacgagatcgtcttcatgcataaagacatccagacccacccaattgtgagcctcgtgctggaaaaccttaatagcctgatgattataacaaacgaggggatcaaggaggtactgtga

SEQ ID NO: 9495 - DNA, 978 bp, synthetic construct
  source 1..978: mol_type = other DNA
atgttttcgaaagcgaccctcaaggagaggagacagtattaccgggaagagtggtcagtcaaggacttgccagagtttatagctaccgatcttaaaaagagggaatttggtttcgaccacaacgggcgcggccccaacgaccgttacaaggtctttagaggacccgaatctcttggaaagttccttaaattcaagtccccatttgcagcctacatttcagtagccttctacaacaatccccgacgaagggaggactggttgaaagcagaatacatctttgatgtcgacgccaaggacatcccaattaggacctgccaatgcaacggcgtgtgcgaggtgtgtctgggggaagctctggagatagtgaactccctgatcgacacactacagtcagatctggggctgaagaacatacacctgatctatagcggcaggggatatcatatccgcattttagacgaggagatgatgagtgcgaacagcgagctccggagcgaagtgctgaaatatgccgcaggagccgaggttccgaaatcgcagtttattaatcccgaaatctccaataagagtttcaactttgagcacttcacaatccccgtggggtactctaagatattcacggacaaagtgaagttcaacattcagcatctggttggcaacgagaaaatcgatggcatcaatccgaagttgatgaaagatatcctgtccagcagacatcacctggataatgacaactgggggtatttcaaacgagatattggccctagacggtacaagaatctggtggctgctatggcccgggtgaatctatccactatcgatgcaaaggtgagcattgacctcaaacgcatcctgcgcctcccaagcagcctccacagcaaggtaagtatgaagtgtatggaagtgaagaaccgggaaaatttcgatcctctcgacaaggccgtccctaagttcgtttacgagcgcaaaggtgtctga

SEQ ID NO: 9496 - DNA, 516 bp, synthetic construct
  source 1..516: mol_type = other DNA
atggaagaggtggtgaaggtcatcgggatcgaacacctaaaagtaatcttatctagcctgacacctgaggacatagtgaagcccgcctacgaaaactggcagaccggcatgaagacaggctacactaggctcaacctggagacgggagagatctacggaataggggtcgaacttaacaaccttccactcccaaataatattttcattgatctgttcaagatagactcctatgacgatcccatcgatgaggaggaatttttctctagctcggaatacaatgagtttttggagttcagcagcagtgaacctagtgaatatatcccggacatcatcaccgagttttgcgagctcaaaggtattgacgagatgaaacgcaagatcggcctgctggcatataactttgagaaaaacgagcggagcaactataacatgtgggaatcatccattctgaataagtactacgatgcgatttacgaggaccataatcccttcatgttctcacagaactccctgtga

SEQ ID NO: 9497 - DNA, 1326 bp, synthetic construct
  source 1..1326: mol_type = other DNA
atgacggaggtgtcttacatcaacccgttatcaaacgagggaagaggaatcatccgaaactatggcgacctcaaccagatctttaaagaggatgattccctgattgagatctgcacccatactgcaaaccagaaactcagcgatgactacattccaaagtcgtaccacgacctggcccttaagcgcatccaatgggcgatagagaagaagaataacaaaaacttcacccaggcggaatttgaatttctgaccaatgacgagctctacttacaggacgtcgtaactttccacatattgtgtcaggcaattgctgttcagttcaacaccgggtcacgggagacccggctgtttgtccagagccaaggaacactcatcctcgaacgactcgctaagataccccccatgtccagggctgagatcatcgacgacgtactcgatgaagtgaaaattgatggcagcattaagtggaaaagccttaaggacatcgtggcaagcaagaggctgaaactgactgatcttctgatagaccggggcgatattgtgctgcagcaggacgacttccttaatagatttgccgaccggttccacgacagaagtccggatcgcatgtacagcatcttgatcggcgacagtgtgaaggaacaaatactttcaaggctggtcatgcaaaaaaccgaggaatacatcaaacgcatcaaggagatgtcttctcgaatcgaaatccaccctgccattatcaaaattggcgaggagctaaaggaatttattcccgacgagacgggcaagtacaaccagtattatgccggcaacggaggaatctacgggagtgtgcaggctggtaaactgaaccctgacgctttccccccttgcattcaggaaacagtgaatggagtgtcttccgggggtcggaatgacgccatcgtcctgctgctgacatcgttcgcctcctatgcgagattgtatccacgcattttcgccagcgaggaaaacgtgaaggtttcagacatggaccccgatctgacaatcacagagaatgagattctgcctctgatcttcgatgccgcagataactgtaccccaccactcttcgaggatcagccacaagagaagatcaatattatatccaaactcgggtttggcatgcacgataggctagacattaaccacgaaggggaaactaaatggtacacgcccatgagttgcgagaaaataaagatccatctgcctaatctatgtcatcccgacaagtcctgcaaggggatcaataacccgttgagctgctatggtcgtaagaagttccagctggataatgcccagaaggagtga

SEQ ID NO: 9498 - DNA, 804 bp, synthetic construct
  source 1..804: mol_type = other DNA
atgttcaacgagcacgttataaagattaaggaggtgttccgcatccccaaggtgctgataagtggacggggaggttgcggcaagagcaccatcgtgtccctgctggctcggaaactcaagaataatggaaatagaatcttagtggtcgactgtgacgagagcaatttcggccttaacaagattttgggtatcgaaaagccgaagaaaacactaatgaacaatcttggcgggaaactggcggtcagggataaactcctggagatcgtgcagaaggatgagaatcatctgaacatttttgatgtcatgtccctcgatgatctgtcgaacgactatgtgacttgggatgacaatctgggctttctggagattggcaaaatcgaacatagcatggaggggtgtgcatgcccaatgggggctttgagccgagacttccttaaccacctcacgatcaacgaaaatgagtggatactggttgacacagaagccggcatcgagcactttggcaggggggtgttggagggagccgactttatcatcgctattgtggaccctagcgaggacgccatactcctggcgaacaaagcatacaaattatctttcgaaaacaataaaaacttcggggtgattctaaacaagatcgatgacaatctcgaagagatccttaagagtaagttggattccaacattgccattctcggaatcattaactactcctcagacatagccatgctgaacctgcagggcaactcagtagaaagtgtatctatcggtgtcctggatgacattatcacctgcatcaactga

SEQ ID NO: 9499 - DNA, 630 bp, synthetic construct
  source 1..630: mol_type = other DNA
atgaagctgaagaactttaagagagaaaacatgatccctcttcccgtgactctgatcagcaccgccaataaagagggcattcgcaacatcgcgccttattcctgcgtagtgactatcttgcggccaacaaaccttgtctgcatagctagcgcaatgatgagggacacatacgttaatatagaagagaccggggaatttgttattaacatgatcagtgccgatatggtggatgccgtcatccccacgtcatcccatgtgagctttgaggtggatgagtatgaactggccggtctcgaggccacggaatcaaaaaaggtaagtgcaccagggattaagggagcttattcgcagatggagtgtaagctaacaaaaatctacaaggacaaagaccccattggtatcccatacctgctcatcataggggaagtggtccacctggaagtcgatgacgactgcctcgacgaggagtacggcgtgctcgatttgaacaaggtgaagccgttaatgatgctggagtccgataaaggcatgcacttctgtaccattgaggacctgaataagttcgaaaccttcggcgcgatgttcagcgacggaaaagaccccctggagtggatgtacgagggagactga

SEQ ID NO: 9500 - DNA, 546 bp, synthetic construct
  source 1..546: mol_type = other DNA
atgaagattgaaagtatcacggattttgaaaatctagactcgcctcgcgtgcagcgaatccccggcttctacggcgaaaagctcatagatggtgtggtgattaggaaactgccaatgttcagtgacgagcggggctttctgtgcgagttcatccgcctgaatgatgaggaactcaaggcaagcaacatcaagcagatgattgcctcatattcttatccaggcatgatcaagggctggcaccttcatagcaaacaggaggaccacctgttttgtgtcaagggaatggtgaaagtcgttctgtacgacttcaggaaagattcccaaacctacggtatgataaacgagattttcatgggggacaaatcccccataattgtatatattcccccggggatcttccacggaacaaagaacattggaatagacatgtccatcgtgatcgggatgcctagcttgttttacgacatcgatgatgtcgacgagagacgggtgaatccaatcgacaacgatatcatcccctacgagtgggactgcaagatggaatga

SEQ ID NO: 9501 - DNA, 2727 bp, synthetic construct
  source 1..2727: mol_type = other DNA
atgaacaagaaactgttgatcatctccgtgctcgtcatatttatcttcattaatgcggtctcagctgagaactcgacagatatcaacctggagctcaatcacaacaatgacgaatgcatcaaggaaatctctgatgagtcctcaacagacatcgatctgaagatcaactacgaatatggggatgaaatcaacccggaaatctccatatctcactgcaataacaacatgaactatacaaaaaatataattcacagcaacaactacaggattaccatgaacaagctcaatgacggcgcagagtgttcggtgagcgtgtcagccctcgggtacatcacccagatccagaatataaccataaactcccaatccaacaaaactaccatctttaatctaaaggccacggacatctacaaaatgggctatgatatgacaaaatccgcagatagactccttaacttttcctctgccgatgacgtgctggttattaccactgccggaatgacaaggatcaacgacattactacagaaaacgccctggacggcatttataatgccgctgacggccacataacgtacggcaaggggaatcttttaacactccacgccatacgcacagaccccactaatttcgccttctttattaagaaaggaaacaggttgacaatggcattctatcagaatgctagcaccacgccagtctataccggaatcggcggggtgggactgacgacaaatcagtggaaaaaacttaaaggcctcatcggggccgacgacgcctatacctacgtaagtattgctaacgcctggaacgccgggctctatagcgacatcctgacgctggcctcgtatcatggacatgtctgcaccggtctgattagtgggcaggctatggtgactacgctgattaagtactatcctccacggggggagaccggcgcccagcctcttgagaacaccgcctactacgtgctaggagtgccgggcggtagcgacgacgacgcattcacatggacacttgatatcacccagggcaagatgtcatacattgggtttgacaccatggagaacaaaaatatgaacgggttcatccgctggaatagttcaagcaacaccggccttctcatcataatgtcttacgacgaggcaaagataaagaatacatttaagagcctgtatccaaatattaatcccgacaacagtgtgaccgaagacctgatctaccaaaactggttgattagcactttgatgagcaatcccgaaagcctggtcacaatcgaagcagcctataaagatcttaccctggaacagaagaaccagctgataggaaatcaactgtggagcgcgtcgaacattactgcgcggggactggatttggactacatcaacagtctgaacttgcccgatgctgagatggagactggaatcttcaataatgtccatctctctgactcacagctcaagcaaatcggggtggatgcttctctgaaagctgtcgattacttcaaaaatatcaacgttactatcgagaaagacatgtcgaacttttatgtgttgacgggtgcgggattcgtgcggattaacgacaccgcaacctctatggtgtttgacggtatcgaggatatttttggcgcccgactgagccggggaaacctactgccagtgcacaccgcactgtggaaggacctgatcatcgagttctactggctgaacactagcgatatctacaacagcgtgacttacagtctaaagtataactcaacaaccgggcagctgtacgaatgctcacagcagtataacattcaggatcggagtctgaggtacgaccccccttatgacgctctcatgggctggctcttccataatcacgtttgtactggtagctctcccggcgtcttgctggcggataagatattcgacgatctccccctgggtgagaacgagagctacgtgctggtgtcaacgtacacctactgtaaggacgacatgttatcccgcctccttggcgtgagcccgggtatgggtaattactataacctggcttactccaatagtgacgtaaatgccggcgccctgtggacggctgattctgatataatcatccgctggaatagtgagacaaacaccggaaccgccacaatcattaagttcggttaccctatcttcaaagatggggccgacgaatacgcggaatggatgagattcgtaaagggcgactatagctctgagaacattgtctcgttacctactttaagttttgaggtgaccaagccaattaccagagatgattacaataagatcatttccggcaagtccgatgatgagggaattaatgtcctgtcctatattagagctctgccagacaagattcctgccgtgctaattgacaacaacggcatctctaacggaaatgatggcaattccatcaacaaatatcccaagaaaagcaataacaacagtgcaaacaccaacagtatcttctcctcttcaaacaattacaattccccaagcaagggactcaatcccaacgttggggtgagctcctactctctttcaggcgactccgatgttgaggacaagggggaggcaagcagcaatggaaagtcctacgaagtatccaagacgcctgcaactaaatccattgacagcaacagtttaatctacgccctcgttggcgtcttggctatcggtattctgatcggcctggggtttatgaaacgtcgaaagtga

SEQ ID NO: 9502 - DNA, 1989 bp, synthetic construct
  source 1..1989: mol_type = other DNA
atgagtaagatatttatcagctgcgccctgccttatgccaacgggccatgccacctgggtcacatccgttcgacctacctgcctgccgacatctatgcccgatacaaccggatggcaggcaatgacgtgctgatggtgtgcgctaccgatgagcatggcacacccattgctgtaaaggcagataaggagaataaaaagccaatcgaaatttctaaacgctatcacgatatgatcgttcgggacgtcgaaagcatgaacatatctttggataattttagtcgcacgacggacgaaaagcattacgagattgctcagaacttctttaaggagctgtacgagaaaggacttatttacagacaggacctggagcagctgtactgtcccaattgcaagaagttcctcccggacagatatgtggaggggctgtgccctgtgtgtggagccgaggcccggggagatcactgtgagaaatgcgggagggccctagatccaaccgaactggacgagccccattgcatcacctgcgggactacccccgtgatcaaagacacttaccaatacgcattcaagttgtccgagtttgaagacgagcttaaggagtatatcgataacaatgaaaacctgccttccaatgtgaagaactatgccagcaactggctgaaagaaggattgaaagactggatcttaacaagagatatggactggggcatccccgtcccgttggacgaagcaaagggcaaggtgctttacgtctggattgaagccttcttgggttatatctcgtctgcctcacagtggtcagcgcagtctggcaaaaaatgggaagaatactggaacgactttgtagtgcacttcattggcaaagatatcatataccaccactcaatcttctggccaggcctgttgaaggctgccggatgtaaactgcccgacatgatttatgccggcgagtttctgtcccttgagggagaaaagatgtccaccagtaaaaattgggtgatctggatcgacgactttgtcaaggagtatgaccctgacattctgaggtactttcttaccattaatgcgcccctgaataaggattcagactttagctgggatgacttccaaaagcgaaacaatgacgaactcgctgacgtgattggcaacttcctgcatcgcacattcacattcacacgaaaattctttgataacaagatccctgaatacgcaaatccaagccgggaggatgaggagtttagaaagtctatcgaaagcttaccgaaggttgctggggaatttatagctaacttcgagttcagggaaggcctgctggagatatttaaagtcgctaagaagggaaataagtatttcaatgatcaggagccctggaaagcggtcaaagaagacatgcagaaggcagctaactgtctctacctctccaaccagctggctaaaacactcgcctacacccttaaaccttacctgccaacgaaagcggacgccatagctaagatactcaatattgatgagctgagcaactgggcagacgcagccgtcttcctcccgagtggctacgagatcaacaaggccaagcctctattcaaaaagattgaggatgaggagatagaggcgcagaaggaaaagctccagaagaacctaaagaacaacgaggatgagaatatgagtgacctgattactattgatcagttcgatgaagtgatcattaaaatcgggcagatcaaagaggcagagaagatcgagaagagcgacaagctcctaaagctgcaagttgagatcggtgaggacaaaccccggcagatcgtggccgggctcgccaagttctattccccagaggaacttatcagcaggaaagtatgtgttgtggcaaacttacagtccgccaagctcttcggcaccctcagcgaaggtatgattctcgccactggagaatccggtgccttgctgactcccgatgtcaaagcggaggtgggggaacgcatccaatga

SEQ ID NO: 9503 - DNA, 1578 bp, synthetic construct
  source 1..1578: mol_type = other DNA
atgcctgaatccgtcctagtcaacaaagccgaaaactacttgaaggccatagccaatgacgctattagtctcgataatatcgaggatttcgagtacttcaaggacctgtactttaaactagatgacaggttaaactttcttcaggagcttaaggaggacatggatgcccaagggtacactacaccttttacatccctgaacaaatacggatcgaaggccgtagcggatatcgatgttgaggagatgggcgagaacagccgacacaacaaaatcttccgcatgaaggccaacgcgaagaaaaacattctggaccgcgtgaaatcagctatcgattcacacaaaatcgcaatcggcaacttggagcagtttggatatgtgaagtgtgattcctgctataaaaagtacagcatgagcgaatacaagcagatagagggaaagtgcagttgcggatgcactattttttcatttaaaatccgaaaggacgccacccatagaatagagataatcccctacctgccgttgtccggcaattacatggttctccgaaaccagctaaacacttttggccgggagtctctgaagcaggtgctgaacatcctcaaacaggaacgcagaggtgtggtgaaaacaatagctctcgtgatacgttttcgagataaaaacaatcggctcgtgagaaagaacatcaccctcgactctgagtatattaacaactatgaagaagaggtgagaaggatttacggtaagcgggtcaggatcgaagcattacggtttcaccggaccaagcccgccatcatcgacgataagcatgcccgcacggccctggctattgggtacgtcaggtatagcgagcagataatcgacgacattaaggacgaaatacttaaacgcaagctcagcgacttcaaaagaattaacacctatgacgagatcttcgctgagtatgaaaataagacgcccaacttcattgacaagtatgacttggaggcaatcgataaatggcgcaaatctcagatcaaggagaatttcaagcacctgggcttctacgataaatacgggaacataaacaggtctcttagccgggacctgaagaaaagggaaaatatttacaaaaacattctgagaaacatcgcatcggcactgatcatctgggatatcttcaggtactacattacaacttcaaacaactcccgtaagatcgacatcagcccattcccctatatccgggtggagctggaccgggaacaacgcaaagtcttccaaacaacccacaaaaaggtaatcgaaaccctgaatacctatacgaacattaagatcattccagtttgtgaaatggatctgctgctgcacgataaatttaagttcgaaaagcagatcaaaaattccaatattaaattcaatcatgtggcattgggggctgccctgattcatgagaatagcgacatcgagctcgaggacattagtaatgcgcttaatattaacgagagcaagatcaagaaagagattaagaatatcgaaaatattaagaatccaaagagtgacaagtccaagaagttcctggacctcatcaagaagtga

SEQ ID NO: 9504 - DNA, 465 bp, synthetic construct
  source 1..465: mol_type = other DNA
atggacgaggatgtgaagacagtgcatatcaccaaagccttgagttctgccgtgatcgtgaatctgattgagaactaccccaatcttgaagtaataacttgctccccttcggtgtacgatagaacgtcaagcaaatatatcgacgcactgtcccagctcgatattgaggttaagaagaaatacaattggggagcgaagagccaaaccaatggcgctgagttcgaggtcctggaactgagcgacaacgggttaaaaccgaaggaaatagcccagaagctcgacctgaagctgaaccgcgtctattacctcctgaagaaaagtaacgcaaaatacgacaatcgaaaacggaagcacgatcacgaagagattaaagaacttaaaaacgagggcttgtcagctaaggagatctcccagaagctcaacatcccactgaggagcgtctactatatcctaaacaagaagtga

SEQ ID NO: 9505 - DNA, 1014 bp, synthetic construct
  source 1..1014: mol_type = other DNA
atgatgatcctcccacagattcctctgtatggaatagccataatctgtggactgctaagctttttcgtcagccgcctgactatgccaaggatcatacggaagctcgaagcggcggacatcgtggggaaagatattcacaaatcctggaagcccgtggtggctgagatgggtggcttcggcatcctgtttggctttattataggaatctttagcggcatatacatgcatgacattcttacatttaacctggtggtggtgctggtagtaatcctgctggttggaataatcgggatcgtggacgacctgcttgccctgtcttcgaaggagaagttcttccttctgttcctggccgggctaccactcatctgggtggcccctcccaatgtcggattactgtatctgatcacgattcctattgcattatccgtcggctctaacctcaccaacatgcttgcagggttgaatggaattgagtccggtctgggcattatctcaatggcttcactgacaatagcctgcattattttgggcaaatacgacgtgaccatcatctccatgagtatgctcggcgcactgatcgcatttctctactataacagataccccgccaagatattccccggagacaccgggaccctcattatcggtgctgccatcgtttgcatcgccttcattggccgggtgaaacttatcgcattcattgtactgatgcccaatattattgacgcagccttgaaattctacagtgctgggtttatgaatcgtcagcagcagaagccaacgcaactgaacgatgagggtaagttggtcaggcctgatgttgggtttaaaagcctcatccgcttgattttgagaaagccgatcgccgaaaaggatgccgtgcgactcatctgggctatcggcttcgtcttcggcatcctgggtatcgctgtggcgctaacaatgccgggggtccttgagagcaaaactctcatgaacttcttacagatcaaggaaatgctgtaccacatctga

SEQ ID NO: 9506 - DNA, 669 bp, synthetic construct
  source 1..669: mol_type = other DNA
atgatgccctatgtaatactctccgccgcgatgacactggatggtaagatcgcaaccaagaccggaagctcaaacatctcgggaaaaaaggatctgctccgcgtgcacgagcttaggaaagaatgtgacgcgattatggtggggatcggcactgtcattgctgatgacccaagattgactgtgcacaaggtagatgccaaaccggatgacaaccctgtccgtgtggtggtggatagtaaattccggacccccgctgatgcccggattaccaattctgacgctgaaacaatcatcgcctgcgcaagagagtataaggacgaactgatcgccagcgataaatacgaaacattcaaaaagcgaggagttaagtttttctactccggcagtaaacgcgtggacctgaagtcactgatgagctacctgcatgaggaggggatcgacaagctcatgcttgaaggcggctctacgttaaacttttccatgataaaggcaggcctcattgacgagataaggatttgcgtcgccccaatgatcgtcgggggctgcgacagcaagaccttctttgacggagaggggttcgatctgatgggtgaggccgtgaagctggagctaactgacagctaccagttggacaaggacctgatcctaacgtataaagttctcaaatga

SEQ ID NO: 9507 - DNA, 465 bp, synthetic construct
  source 1..465: mol_type = other DNA
atgaaggccagtgagcttctggaggccatcaaggaaaacattcggtattacccgatcgagtatttgaagaacaaggtggccgacgataggtacaaagatcctctgaccaaaaagctggctgagtataactccaacgcatatgacgatatttatgagacagtgatcatcgatgactttgacatcaatgacaaggtggttaaaaagatccgagaagacatcgcattctattttgacaagtatggcggaggcgaggatgagcacaagatattcgcggagaacatttcactctacctggccctcatagctaaaaagccactacacccctacggggaaaacaagaaagacgaagtctactacagcaatggctcttactactgcagagggcgcatcaaatacattcatgacgaaaaaagcctctgccggtactgtgtatgcaagaatgtcggattcatggatctgttctga

SEQ ID NO: 9508 - DNA, 666 bp, synthetic construct
  source 1..666: mol_type = other DNA
ttgaacaaacgaatcgatctacacatgcacagcctgttctcggatggggaactcctaccctccgagcttgccagaagggccttgaagctcaaccatgaggcaatcgctattactgaccacgttgactggagcaacgtggaggccataccaacaatccaggatgcaattgacgacattaatgctaactgggacataacggtggtgctgggtgctgaggtcacacatgccccagtcgagtccattgacggcatcgctgagagggccaaggagctgggagccgagatcgtagtggtccacggcgagacgctgaatgagcctgtcactcccgggacaaaccgggccgcggtggaaagcaaacacgtggatatcctgggacacccgggcctcatcaccaagaaggaagcggaaattgcccttaagaatgacatctatcttgaaatctcagcgcgcaaaggccactgcctcggaaacgggcacgtagctaacatcgcctgtgaggtgggaaataagctgctggttgataccgatacccatgcacctgatgacatcattacctttgaaaaaagctacgaaattgcactgggtgctgggctgaaccatgacgacgcaatgaaagccatcgtggacaatccccgccggctcctgaagagtaagggcatattatga

SEQ ID NO: 9509 - DNA, 1224 bp, synthetic construct
  source 1..1224: mol_type = other DNA
atgaaggcaaaagcttttaagatagccgacggtgtgtactgggtgggtgtgatccactggaatagtcggactttccacgggtacggaatccccgggaccacatacaacgcatatttggtgtttggtgaggagaaaaatgtccttattgataatgtttacaggggactgttcgatcagtttgacgcacgtgtgaaagacgcgttcgaacaggagggcaaggagtttaagatcgatgtattcgtgcaaaatcattcagagatggaccacagcacatttctccgcgatacaatcgccaaatacaaccctgatgcggaaatttatgcctcacaaaattgcattaacttcctggaggctcagtatcataacttctcggacctggagctcaatgctgtcaacaccggtgacgagctggacatcgggggccggaccctaaagttcatatccgccccaatgcttcactggcctgacagtatgtttacctttctagcggaagacggaatactcttcagcaacgatgccttcggccagcacctgtgtcatagcaaacgatttgacagggactatccgttggagtacgtgttaggggaagcccagaagtactatgctaatctggtgacgctcggctccccaatgttcagaatgaagctgcaggagttaactgacaacgggatactggacgagattaaaatgatcgctccatgccatggtcagatctggactaaccccgcccccatcgtggaaaaatactctgagtgggcctccggggtatgcaaggataagattacggttatatatgataccatgcaccacagcactgagaaactcgccttccaaatcgccgagggcattatgtccgagggcgtcgaggtcaagatgtactttatgcaggaagacgggcccgatgatgttatcaccgacattctggacagcaaggcgatcgcaatcggcgcccccacaatgatgaacaagccattcccgagaatcggaaacatgatgtactggctggattgtgtgaacttcaagggaaccggcagtgagaagaatgcattgatcttcagctcaaaaggctggggcggaggcgccgtcgacaagctgcagaaagacctggaatccgccggatttaacgtcacggacacaatggatattctgtttgtgcctgatgaagatatgcttgctgaagcattcgaaaagggggccgagctcgctcgctctatcaaagaatga

SEQ ID NO: 9510 - DNA, 507 bp, synthetic construct
  source 1..507: mol_type = other DNA
atgtccgacctgattatctatttcagcagggatggggaaaattacttctccggcgaaattaaaagcatcgagaagggaaacaccgaggtaattgccgagtacattcaggagtttactggtgcggacatattcaaagtgatcccaaaaaaggactatccttccgactacatgaagtgcatcgacattgctaagaaggagttgaaagcaaacgcccgcccggagattaaggaagagctgagtgacatctcagactatgatattatctacatcggcttccccaactggtggggaacgcttcccatgcccatgtggacccagctggaaaagctagattttacaggcaaggtcataaaaccatttgtgacacacgaaggaagccggttcgggaaatcgggtaaggacctgaagagactctgtaaggatgccataatcaaaaaagggctgtcaatcagcggcagtgatgtgtacgacctcgcagatatcgtcaagatctggctcgaggagtga

SEQ ID NO: 9511 - DNA, 4047 bp, synthetic construct
  source 1..4047: mol_type = other DNA
atgaagatcaaatccatctacaaaatactgatatttagcatagtcctgctgattagcctgtctgccgtcgccgccgaagagagtatggataacaccacaagcaacgatgacgtgctaacttccgacagccatgatgatgtgcttaccctgaatagcaacgatgatattctcacctcttccgaaaagacatggtatgtgggaaaaaatacgactgtgggaggtagcggaacacaggaagacccatttaataacatcgaactggcgctcaatcactcgtccagtaatgatacaatctatatcaaccccggggtttacgacggtccgcacaacacgaatctgaaaatcgatatcgacaacctaacaattaaagcaaaaccaaactccgtgttattaaatgcaaacattaacaacacacgagtgttcgaggttacggggaacgacgtttcaatttcagggctgaacttctccaacgtgtatatggagtacggcggggtgatcaagtgggacggaaatggaggatcactcaccgactccacgatcaagaactccaagtcccgagtggggtctattcgttgggagggcaacaatgccatcatcaataacatcacgatcctcaactctacgtccgaaaatggtatcctggtcatatcagggacttcttccaacataacaaactccacaattcgcgatactaaggggtattatggtgcagtgatgttcggcggcaaattcaacatcatcgacaactgcacctttattaacaacaccgcctggatgaatggcggtggagtgtatgattggggggccaacaacaccgtcagtaactcgctttttatcgctaacaatggaacccgcggtggagccattctgacctacgaaaaccagccaaaccgcatgaacataatcaacaacacctttattaacaatatcgggggacaggccggggctattgtagtaagacgggccggtgcaaacatcgataactgcacttttatcaataactcagccggatctgctggagcggtcctcatattgtctgaagccaatatcaccaactccattttcgagaacaacagtgcttcaaccgtggggggcgctgtatacattacaggcgacggctccactatcgacaacagcatctttattaacaacaccgcaaataacgacgggggcgcaatttactggagcggcgagaacgggaccgttaccaatacaattttcattaacaacacagtaaacaacgggaccggggaggccatcgggtacattaataacgtgaccctcaataatgtgacattggtaaacaataacattgaacaagtcattgtgaacgaaagcacacccacatttgagtatgtgttcaaactgaccgagggatacagtaatgttaagttgaccgacaattatacggcattctgtaccgaaaagacgaagtggtcctcgagccctcgaactccactgatacctcacaatgatctgtccatccttaaaaaccatatcacaggcgagtcagtcgcggagtatctgaagatactgatctacaagtatctgaaagatccagaccggattagaaacctgcagcaaaagatctggatcttcaccgacgacaactatattgacagcactgattcgataatcaaagaggtcatctctgattataatagtggcttccggatacccaaccagggattctctgaaatcataaatgatacaaccgtacttagaattgactttaagtcctacaacattaccaagcagatccaaaacatgatcggatttaagagtagcatcgagaatattacttacaacatgtccgttgttaagaacacactcactcccgccgtgattctgggaaatcaaacaacctttgaaatcaaagtgactaacacggggagttactacctcacgaatgtaagtgtgattgaagacggctacgacgggctcatctacaacagtttctcagatcctagcggaaaatggatattctcccgcaatagtgatggaaagcccatgtggacatacaatggcaccctatacgttgggatctcatacagtttcaatgtaacattcaatactacaaagaccggcaacttcaccaattttgtagtcgtcacatctaacgaaaccgacaacaagaccacgaacaataccaccaaggtgtataagcccgatatgactgtggagaagctgtctttgaatcggaccgtttacgtcggaaatcagactgtctttactatcgtggtccgtaataccggcgattgcgatttgggtgacgtctttgttgtggaaaaagccccagaaggactggtgtacaactcattcaaaggcaccgactggagctacaacaatggcaagtttacttacggtaaagtgctgaaagtcaacgagtcggtcagcttcgagattgtcttcgacgctgtgagcccaggtaactggaccaacgtggttgttgcaggctccaatgaaactgacaacaaaacaggtaacaatactactaaggtgtataagccggacatgaccgtggagaagctgagcctcaataggactgtgtatgtgggcaatcagaccgtcttcaccatcgtcgtgcgcaacactggtgattgcgatctaggagaggtcttcgttgtggaaaaagcccccgagggactggtttacaactcatttaagggcacagactggtcctacgatggcaataaattcatgtatgggaaaaccctgaaggtgggcgagagcgcgagctttgatatagtatttgacacaatcagccccggcaattggaccaacgtggttgtggctggctccaacgtaaccgacaacaaaacaggaaataacactaccaaggtgtacaagccggatatgactgtggagaagctgtctctcaacaggaccgtgtatgtgggaaaccagactgtcttcacgatcgtggtccggaatacaggcgattgtgacttaggcgaggtcttcatcgtggaaaaagctccagagggacttgtgtacaacagctttaaaggcacagactggagctacgacggcaataagttcacatacgccaaggtgttgaaagtcaacgagtcggtcagttttgagatcgtattcgacgctgtgagccctggcaattggaccaacgttgtggtggccggctccaacgaaacggacaacaagacagggaataatactacgaaggtgtacaagccggacatgacagtggagaagctctctttgaacaggactgtgtacgtggggaatcagaccgtctttacgattgtggttcgcaacacaggtgattgtgatctcggcgaggttttcatcgtcgaaaaggctcccgaaggacttgtgtacaacagcttcaagggcacagactggagctatgacggcaacaaattcacatatgctaaggtgctgaaggtcaacgagagcgttagtttcgagatcgtattcgacgcggtgagccctggtaattggaccaatgtcgtggttgcggggagcaatctgacagggaataagaccggcaataacaccactaaggtctacaatcccggtttgaaggtggagaagatcactctcgaccctgtggtgagcgtgggtgagatcacatcgtttgagatcgtggtccggaatactggtgactgcaaactgggggacgtctttgttcacgaagatagttacgagggcttaaggttccatagcttcaggggcgacatgtggaagcagaagggcgacacgttctattatcagggcgtgctgaaccctggggagtcagtgtcatttgtcattctgtttactacgctgaagcctggaaatttcaccaatattgttaccgccgggtccaatgtgacgaacaatacgaccacggaaaacaaaaccaaagtaatagagaaccacaccaacaacaataccaacggcactaacaaaacagtcaataatgagaccaaagaggtgaatgtccacaaggtggatacttcaagagcaaccgggaatcccctgctcgcccttctcatggtgctacttatgattagtgtgaccagcgtgagaaagttcaagaaatga

SEQ ID NO: 9512 - DNA, 789 bp, synthetic construct
  source 1..789: mol_type = other DNA
atggacaacaggaaggtgatcatcatcgccctcatagcggtgattgttgtgctcggtggtctgattgcctacagcctgtttactcagaaccaggtccagtatcagaccatagctgtgagcaatgcgaccacgatggaagtgccggtctctaaaaactcaaccttcttcaatgacgccctaggcatcaaatactaccaggacgacaaaagcggcgttcaggtgattagctggaacggccaggaacaagcctcagctaaaggggcggtgaatattgccagccaatttgaaaagcagaaggcaggaaccacacagtcaattgaaaacggagtgcccgtttacgagaataagaagctgcggtgcttcatcatcgaagtgaagaacgccacaacgaacgacaacatcataatcgtggcaaaggacaagaacgtggctttgcacatgcttaagagcatcaaattcggcgtaagcaacattacaaatgcagctcaagtcgagccttacgctgagtcggggggaaaccatctgaatgacaataacgacactgtcttcgtcttttacccatggtacgtatacgatgagggggactacgatgcctacgatgactactcgtcccgcgattccgagtatgcagatgacagttactacgactattccagcagtgattccgaatacgccgatgactcctattatgactacagctccagtgatagcgagtatgccgatgactcctatgatgaggaatatgacgagagcgatgaggattatgagagttcagaggactttaattga

SEQ ID NO: 9513 - DNA, 315 bp, synthetic construct
  source 1..315: mol_type = other DNA
atggacgaactcaagtccgagattatcaagttccagaaagagagggattggaagaagtttcacaccccagagaacctggctaagagcataagtatcgaggccgccgaacttctagaacatttccagtggggcaaggattacagcataaacgaggtggccgatgagctggcagatgtactcaactactgcatcctgatggcggacgcactggacctggacatcaaagaaattgtcttgaataaaatgaaaaagaatgctgtgaagtatcccgtggacaaagcccgggggaacgcggccaagtacacagagctctga

SEQ ID NO: 9514 - DNA, 1869 bp, synthetic construct
  source 1..1869: mol_type = other DNA
atgatcgtttacgaggccaccaaggccgaatttattgacagcgtattttccggctcgatcacagacgagatctacgagatatatcagcagaagataggcaagtccggtaagtcacagatcatgtcctgggagaacagtatgcagtacatgtacagggtgttggaagacccggagatccctgatgatagcggggtggctatcgagttcactatccccaccacctccaaacggattgacttcatcctgactgggctgaaccagttccatgaggactctgttgtgattattgaactgaagcagtggatggaggcgcagaaggtggaaggcaaggatggggtggtcaagaccattctgggtggaggcctccgggagacaacgcacccttcctatcaggtctggagctacgccagcctgattaagaactttaaccagacagttgatgaagatgaaatcggcctttacccctgcgcatatctgcataactacgacttcaccgacgccgacgacctgagcgacgaaatttataagccctactatgacaaagccccactgtatggcaaaagagatgcgctaaagctcagaaacttcattaagaagtacataaggcatggagataattcagacatcctgtaccgcattgacaatggtaagatccggccttccaggaaactgcaggactcacttagcagcatgctggaaggcaacaaggagtttgtcatgattgatgagcagaaaatagcatatgagatggctatcaagatggctcgagaaagctatttagatgataaaaaacgagtgctcatcatcgaaggcggaccggggactgggaagtcggttgtggcgatcaatttgctagttgatatcattgccgacgacatgctatctctgtacgtgaccaagaactccgccccaagaaacgtcttctttgagaagttgcgaggagacaaatacagcctcagctacctcaaaaaccttttcaaagggtccggaagttttacaaagagcaagagcaatgagtttgatgctatcatcgtggatgaggcccaccggctgaacgaaaagagcggactctttggcaatttaggtgagaaccaggtcaaggaaatcatgaatgcatcgaagttctccgcctttttcatagacaagcatcagaagatcagcttaaaagattatggcagtgtggaagctatcaggaaatttgcccaagagtttgatgctgaggtggagcagattaagctcacgtcccagttcagatgcaatgggtcagacggctaccttagttggctcaataacgtcttggagatcgaggagaccgccaactttgacggcttcgacttcgactatgattttagggtggtcgattctcccaacgagctgaaaaatctgattttcgaaaaaaacaaggaaaacaacaacgcgcgcctgctcgcaggatactgctggaactggataaaagaaggaaaaaacaattcagacgtacacgacattgagattgacgacttcagtatgagctggaacttgggaaacagtgacacatgggcaatcgatgacaacagtgtcaatgaggtgggatgtatccacacatcacaagggctggaatttgattacgtgggtgtaatcattggcaatgacatgcggttcgacggggaacacatcatcacggatttcaatcaacgtgccaagaccgacaagtctctcttcggtataaaaaagaaacacaaagagaatccagacgaggccctgaaggtggcagatgagataattaaaaatacctaccgcactctgatgactcgcggcatgaagggctgttatatctactgcgaggatatgctgcttcaagcttatttcaaagaacgcttcgggaattga

SEQ ID NO: 9515 - DNA, 1209 bp, synthetic construct
  source 1..1209: mol_type = other DNA
atgattaagaggaaattgtacttaaaccagattgaaaggttaatggataaggaacctatcaaaattataactggcgttcggagaagtgggaaaacctatctgctgaaaagcattcaggaggaactcaagaaccgaggtatcaacgaggagaacatcttcataattagctttgagtccatgaaatacaacaaaatcgagaacttccgggagctggatgagtgcatcatcaacctgaccagaaataccaaaggcaagatctacctgctttttgacgagatccagaatgtgaaaaactgggaaaaaagcatcaatgcctgccgggtggacctcgactgtgacatctacatcacaggaagtaactccgaactgctctcgggggagatggcgaccctgatctctggacgctactatcagattaatatttacccctttagttttagcgagttcatacagtacaagaaggaaattgagaagacagatattgatgacttggaggaactcttcaaggagtatgtggagtatgggggtatgcccccaatccaacaggtagctacggaagacaagtattcctatctgggcgacatctacaataccatacttttgaaagacattattgcccggcataacatccgcaatacagacatgctgaaccgtattctggactatgtgatcatgaacctgggaaagaacttcagcgcaaccaatattgtcaaatacatgaagtacgagcgaagaaagatatcaaaggatactatactcgattacatcctctacagcaaaaatgcatgcttcatccatcaagccccgagggaggacatcaagggcaagaaagtgctgaagcacaatgagaagtatttcctggtcgatcacggattctaccaggctaagtacggcgaaattgaaaatatggggtccatccttgagaacatcgtctacatcgagctacttagacgcggctacgatgtgaaagtgggcatcatcaataagaaggagatagatttcgtctgtactaaagacaaaaagcggatatatattcaggtgacctataagttggaaaatgatgagacgattgaaagggaattttcagggctggtaaagatcaacgacaactttgacaagtacgttctgagcatggataagctagatttctccggaagcggtctcaagcaccgcaacatcatcgactttctcacatcagactatatttga

SEQ ID NO: 9516 - DNA, 2946 bp, synthetic construct
  source 1..2946: mol_type = other DNA
atggagttcaatgaaaaccagaagcgcgtcattgcacacgaaaagggtcctcttctggtggaggcgggcccgggctctggaaagactactgttattgtggagagaattaagtatctcctgaacaacctcaacattgcccccgagtctatcctcgtcatcacctttacccgtaaggccactgaaaacctgagaaacagattgaacgactatatcagcaaagatgacttgtccaaaatgcacatctccactatccattccttctgtcttgagtacttgaagtcaaaagaggggtttctgaagctcttagatgatgataactcagaaaagaaggagctgtttattcagaagcataaacgagccttgggattcgttgggtcggcaaccctctttgattaccagatcccagccattatcgacaagttcggtgagtacacctcattcaatgtgaatacagataagttaatcaactatatcaaggagacaaagccaatttcgaaggattacttggatttcatcgagtccgaaatctattttagcaagaagaggattgaagataacgactttaaggacgactggtacaatgccagatacctgcaaacgcctaaggcctacctcaaatacctggaagtgctcgataacaacagctacgtcgattacgatactctgcagcttaagaccctaaagcacctcacaagagatccgaaaacccagttcaatgctgtgctgatcgatgagtttcaggacaccgaccccctgcaaattcggattttcgagattctccttaagcagagcgactatttcacggctgtgggggatgttgaccaacacatttacgcgtttaggagtagcttccgggattacttcaaggacatgaaagaacgctttgacgctgagatcataagtttggacgtcaactacaggtcaaccgccaatatcgtgcgggttaccgacagcttcatcaagcatcagcgaagtgactacacccagaagcatctggtcagtaataacgacaattatgacaacgatacgttcctgattgaaagtgaggactcacaagatgaagccagcaagattttcaacatcatcgcagagctcaaacgcctgaataagatcgaggactacggcgaagtggcggttctgtacagaaaacacaatacaaggaccattgcgaacctcattgaactgctcgatgagaacaacattgagtttgtcattcgggggcagaacgacctggccgatcagaacgagatccgttccatccttttgctgttgtggtatcttactcgcaacatggacgaaggccacgtgttatctggcgacgaactcgacgagttgaacctaaaagccttctgcggagagtactttgaacccacattctggagcctggaggacgagacgaagacatacctgaccaccctccaagacttattctatgagaatatactaaaagtcgagaatgaaatccgcagcctccagggaaaacggcccgtcaaatcatacaagcgggtaagggtgaacgaaagctatgaaaacctcatcaggatattcaacaaggtaacgccccccgtgattgacctccggcatgtgcacgaggccgacagggaatttttcaacaatctgaacaatctgcgtaaacgaatcttaaataacgaacttacaatcctggacgtgtattacgagctgatctccctgaatttcaataagctgagccaggataaagtgagaaatctttccatgctgacccgaaccatttacaactatgagtcgttcatctcccagactgacgtgaagggcctattttactttctgaataggataatcaagaattatggttcgaattacagtagccagaatggggtgcagctaatgactgttcatgcagcaaaaggattggagttcccagtcgccattgtggcctccctggaaaaagacaagttcccaatgaagatcaaggaccctaaacgcgaaaaacgcaccatatttatgaaggacactttctacaccccaaacgagtttcttaaatacaaggaggtgaccctggacgaggagaatgagctagacagacaggaagaggagcgaatcatctacgtggccatgacccgggctgcagatctgctcatcctgtcttgtgtgggcaagactcctgacgtgatcaataacatcaaaaactacctcaaaaagcccaacctgaacaatgtgatcatcaacaggcacttcaccaataacgatacagagaaactcaaattgaactactcaagtttttccacgtacaacctctgcccctacatgtatgatctggtctataactatgggttcaaagtttccagcgagaaagtcacaaattttggaacagtattccacgaagtaatggagacagtaaacctgaagcttaaggatggtgagaaaataagcaaagaagaactgatcctgattactcaggatatctacaagagcatgttcgatatcaaagagacggaggacgagtttaacatgctgatagactccattcttaactactataacacatatagcctgaaccaagaggtcgtggaatgcgagctgccgtttgagctggaacacgaaaattacattctcaatggggaaatcgacctgatatacaagattaaagacagtgaaatcgctattttggattataaaaacgcagagcacgacgacaataaaatagcccactatgaaaagcagctgtatatttatgctagcgctctgaaggagatgacagagttcgacaaatacgagatcaagaaaggcataacacattttgtgaagacggactaccggcacgaggtggatataaccgatgaaaagatcaataagcagctttataagctgaatgaggtcgctttaaagatacagaataacgagtatcctaagcgcgaaagcggcttctgcaacgtgtgcaagtttcaggttatctgtcaaaactga

SEQ ID NO: 9517 - DNA, 507 bp, synthetic construct
  source 1..507: mol_type = other DNA
atgaacaccacaaagaaccagtccattgtatacgatgagaagacaatctttaaggtgaaggagatgatcgtggccggcttaaataagctgaaactgtttaaatgtaaaaagagcgggaatctcgacttttacaatgacctgaaagagacgttcaccgaaatcgctctgaacctcaaggaactgaaattgtggaatgaactggattacttcctttcaatttcgctttatattgaatatatcgtctacaaaaactccatcgacagctctttcggtcactgctcatttgccattgagttgctgaacttctacatcaacctaatcaaaactagtagcgactattacctcaatctcaccgagatgtccataaaggatttcggaatataccagaacgaaacaaagacccggtacaggcaatatagacgcaagttccacacggatgtctacgtgctgagtggcaacttcactgaggaccagatgtatgagatccatgcaagcctgcgagagtga

SEQ ID NO: 9518 - DNA, 666 bp, synthetic construct
  source 1..666: mol_type = other DNA
gtgtacttcctggacacaaatgtgcccattggctataccatcatccacgatcggtggcacgagaacagcaagaatttcatcgacaacaacaaaaactcaatcttctggagcaacttcgtgaagagtgagtattataataagctggataacatacttgattacatagtcaaatttttaaagagtattgtctgcatcctgaaagtgaatgaaatggatttctactcgtacaatagctttgaggagcatatactgaacgaaactagattttgcaagctagactacttcaaaaaacagaagattttggaaaacttttggaacgagtatgacttcatcgttggtatttccacaaagctttatgactgtttctataattacgcttttgatttcgtaaataattacaacaatcgagatctccggctgaacgaaatcatgaggctgcatgactgcgggctagacaactacctcaagtactatgactacgccctcaagctctacaagaacggcatccacccgccagactgtaagattatcatcgacgcccacgactgtgggctgacgcacgatgatctgaaattcatttcaaacgacaacaaattgatcgatgcactgtccaagatagacaccagcaatctccgcatcattgagtttggactgtgcaactcctga

SEQ ID NO: 9519 - DNA, 1008 bp, synthetic construct
  source 1..1008: mol_type = other DNA
atgtcagtcaaggagctgctgaaggaatgtgggtttctctacttcaaggaagactataaaaacctcctgattaaatgtgaagaagtgctgaagatcgacgaaaaaaatcccatcgccctcaactataaggccatcgctttttactactttgacatggatgacatagccctgaaaatcctcaatgacacgcaaaagctatatcctaagaactactacacactcagcattaaatcccttgtatatattgccctgaaggaatacaggaaagctctcgactgctgtaatgaggggctgaaaatcaaaaatttcgacttgctggagatcaataagatcaaagccttaatttacctagacaagattgatgatgcatacaacttctataacaccatcgaatgccccaacttcaagttcgaggagatattgatagaatgcgagaagtacagtgaggcgctgaactcgtacaacagcaagttaaaagaaaattcccaggatttggagcttattgacaacgtgaagaccctgatggtgaagtacgacctcaatgtcaagccaaactgggacgaggagttctacattagctggatttatcacatcaaacataatgacaacaagaattgcccgaaatgtggcagtaaactgattccaattgtgtatggatatccccttgaagaggcactaaagcaggagaagaacggcgaaataatcctgggaggatgctgcatcaacgacgagatgggtaacctccactgtccaaattgcaaaaacgatttttacatcgatgccctgcacatcgatgcaaagggccccctgtatgactacatcgtcctgaagatcaataacctggatgaattgcttttcgatgagatctgctgttccatctacaagatacgggaggatatcgagtactttgacgatgacgagtttaaggcgttcatcaaccatcttataagcattggctacctctatgagcctgttaaagggtatattaagctggtggatatccactga

SEQ ID NO: 9520 - DNA, 1893 bp, synthetic construct
  source 1..1893: mol_type = other DNA
atggactggcagtattccgactactcaaaaattaaccctaatgcaaagaagcatttccccttcgacaaccctcgggataatcagctggaaactgtgtccgagattgccgatgcgattaatcacggctacaagtatatcgtcctggaagccggaaccgggacgggcaagagcgccatcgccgctacactatccaatatgtccgactcatcgtacattttgaccatcaccaagcaactccaggaccagtatctgagagactttaaagatttcaaggtcgttaaaggaagaagcaacttcagatgtcagaattatattaacaaatcctgctccgaaggcaagtgcctgacggaaggatttgaatgtcggttctctttgaagaacagggagaacgagatcaggaaggacaacacctgcccgtactattatcagaaatacctggctcttcatgccaaaactgtcgtgagcaattactattacatgtttctggagcttaactatgtgaaggacttccagaaaagggatttgttaattttcgatgaggcccataacctcgagtcgaccctgatggacgagctgaccctcgaattttctaagagtgacctcgaggagtacctggactataatttaagatgtgaaaagatcgaggaactgaacagtaacaactacttaaattggatagaatttatcaatgagatcaaggagggctacctcgaggagctgaacaagctggagcgtctggacaagctggaacttgctgagaaaatagcattcatcaaacatcaaatcaacgactgcagccggtttatcgaacacctcactcacgatccgaagatttggattttcgactgggatgacgattatcagaccgcccagttcaaacctctaaaggtagacaactatgccaagaatacactcttcgattacgctgatgtctgtatattcatgagtgcaaccatccttgactggaagctgttttccaaatggctcggaatacctgaagatgaaatctatgcaataagacacaagagtccattcgacatcaacaataaccccatcactgcatatgatgaatataatctgagccgcaagttcattaaggtgaacgcgcagaagagcatcggctcaatcaatgagatcctggataaacacaagaatgagaaaggaataatccacacagtaagcggaaaatgccgggacttcttgattgacaatattgccgatgagagactgatcgctcacgaccgccataaccgctcagaaatgctggaggaatttatctccagtgatgaacccctcgtgttgattagcccaagcatgagtgagggcgtggatctcccaggggacctgtgtcgttttcaggtcatatacaagctccccttcccagactggggtgataagcagatcaatcaacgcgccggcattgatagggagtggtacgactaccgcacatgcctcaacctggtgcagacacacgggcggggtgtgcggtacgatggggactactgccacacgtacgttattgacagccggtttcgctcatacatccgagaggcgtttccatcgaaattcctgcccgacacatttaaagagagcatcgagggcagggagtttgatctgaaggaaaagaaaaggttgatggagattggcgatttccatatcgaaaacaacgactacgagtccgccattatattcttcaaggagctcctaaacaacgagctgttcaaaaatgacatctacccctaccttaaactgagcaacctgtaccacgagaccgggttgtttgagtgcgaggttcaagtgatcatgcgatttcttagctctggggctgaatacaaccactttgaaaaacgactaaaggagcttgcagacatgggttatttcgatttcaattga

SEQ ID NO: 9521 - DNA, 1452 bp, synthetic construct
  source 1..1452: mol_type = other DNA
atgttggagtggaatatctgcaaaaactgtggtgccattctggataattctcagaacacctgcctgaactgccagggggatgtggagaaggtcaacattgattatctcaagaagtatttggataatctcaactttgtcgtgaagacgctgaacatcttcaccccctactgtacgctcacaaaagacatgggcaatattgcgctggagagcctgatcatggacgacctcttcaagtatttctcatatctgggccttggagataacgagattacggacaatgaggtggagtttatcaatagcctgctcgataccaatttttccaaggaggacattcagaccctaacagatgccgagcttgacaaatccctgcccgcctcatttaagtgcctgcaggaaatagacgaatacgggcaaaacttcgacatgtatcagctcaactcctgcagcgaattattcaactgttttaaactgttcggaaaattctttatcacggctgacaacgaactcgacggcgacgtcctgaagatctattcccaatacatcaactacctggagagttctctgaaaagtaagaacactgctctcaagccgattgatcacctgaactacaagccatccaagaaggaggagacacattcactggacgaatacctcaacgagttgaacaaacttgtcggtctggaaaaagtcaagaaggacgttaattcccttatcaaccttgtccagatcaggaagctaagagaaaaacggggcatcaagcagcctccaatgagccttcacctggttttcagcggcaaccccggaactggcaaaaccacagtggcccgactgctatcgaaaatttaccacgagatcgggttgttatcagaagggcatttaatcgagactgaccgctcggggctggtgggcggttacgtgggccagactgccatcaagacccaggaagtaatacaatctgccctcgggggaatattgtttatcgatgaagcatacagcctgacctccaaaagcgaaaacgactatgggctggaagcggtggacacactgcttaaggccatggaggaccaccgggacaatctgattgtgattgttgccggttaccctgcactaatggaaaagtttctgtacagtaatcccggcctggagagtaggtttaataagttcatttacttcgaagactataacgaggaggaactctataatatattctggctgatgtgtgaggagagtaacctcacattggatgaggcgggagataattatataaaggagtacttcaaaagaatctacgacaacaggagcaacaattttgctaatggacgggcagtgcgcaacctgttcgaggaagtaatcactaaccaggcaaaccgtttagctccaaaaaaggagatcagcgatgtggaattgaataccctcacctaccaggatttcctcgtggatgagaatgagtga

SEQ ID NO: 9522 - DNA, 1059 bp, synthetic construct
  source 1..1059: mol_type = other DNA
atgagtgagaaaatctgcagtaactgtggcaataaagtggacggcagcgcaaacttctgcccaaagtgcaagtcacaatcgttcagaaacatcaacgaggtggccaagccaaagagtggggtggtgcataagttgttttacaagtatcaggggggttactttgctgtctccaagagcaagatcgcggcaatcactacattcatcctgttcgccagcctcggctttgagtcgcccaacctaatcatatccagcgtgatcatcgccttcctggtgtacattataggcttcgctataagacggatcaatattattaaccagaactcaaaaatgtttttcaggaataacaatttagggttgatcaccgatctgatgcacctgtttgctttttggcaggaccgggaaaccggaaagttcgcactgtcaaaaaccaagctaatttccatcctcatcttcttcgtgtttgcaacatccgggctttcactgcctaatgctacccccattctggccgcagtcttcggtctgatattcgccctgcctgtctttgtggtcggatacggaatccaccgccttacaacgagccgccctgtgaaaaagatagtcaaacaggccgaaccagataccggcaagaaacacgatgatgccagcaatgctaaaaaagacattcacatacatgaatttgacaagtaccgggccaaactgaacgaactcaaggtaaggtatgagatcaaggaaaaaaacgcccgcaatctgatcgccaagcgtttcacgccgccccaactcacttatgacaagtttattgcttctgttgacaagtccactatgatgttcaacagtcacgccgaggttattagcaacatccttgacttggcgtcccaggacagcaagaagattgacgatgaactcaatgaccgattcgacatcctggaggcgcttgtggagaaaattgacgagctgattgatgagctcgttttaagcctgaacgatgatgaaaaagagggaaatcccagcaatctcctgaacgacctcgatgacttgatcgattctgtaaagaactactga

SEQ ID NO: 9523 - DNA, 519 bp, synthetic construct
  source 1..519: mol_type = other DNA
atgaatggggctggcgctattgactctgcaaactggaccagtgcggacgtcggatacgagacttttaagatacctccccagtatgaaaatccatacagcagtgacttcgacatgtacgaatttgatgaggacatcgatgttttcaccatcaggtacgtgaaccccaatctgatggatctgtatgggcatttcctaaatgaataccacggaaagaaggtgaacgtggccggccacgacgccgtacacttcacatattatgatcggcatgacaagaccaacaattcagtcctttggtttagcgccggtgaggaattttactatatcaactggattggcagcaacatcacaccggcaattaaggaggtcgtgaaaagctccctcaaatcaaactacacccacaaggagttctactccatattaaacgataacatcaaaattacgatcctgtccattccactgaatctcaaagggttgatcatcctcctgagctctacgcacacaacttcggagatggtgtga

SEQ ID NO: 9524 - DNA, 891 bp, synthetic construct
  source 1..891: mol_type = other DNA
atgaccaaccacaaacacctgcgcaccgttattgaggatatatattcgaatggaaacaagctcactgaggaactcactgcccgcctaatacatgaatttagatactccaacttgtacattcccagcaagaaagaggacaacaagctgaactttatcatttacgaggatgacgactccaaacttacgccactgttcaccgatctggacgaatttagaaagttctataaggatgaggatgttcgggccctgcaaaatccctttgaattgtatcagaacgtcctcaagacaacggacatcgaagggtacatcctgaaccctgcgagtgaaaagtatctctttaaaaaagaatttatcctggctatcaacaacattccaaagacagacttctacactaccaatccctactctgaggaggagttgctcaacatgaagaggagcgtggataacaaaaatctggaacgattcatcgagaatagggcaaacattggggatttcgagggcttatttgagcagatggccaattcacagctattcgctttaatgctctctgatctgaagctgaataaggagatgattagcctcaagaagagtgggcctgtggcggccatgtataccgacaatgtaggtggcatctatgcaactctgttcacaagcgagcggaaaatggacgcagtcaagacaaaaaaatacaagtattcccagctggtgaacctggccacacttgtgaatttcatcctgaccgaggacatggacggccttatagtgaacccggaaagtgacaatgtgttggtcccacgtaccacgctgcttcggtacagcctgggattcgagatgtacgccaacgacgaacgcctatcagaatccatgttctacctcttcaggatcgagtga

SEQ ID NO: 9525 - DNA, 606 bp, synthetic construct
  source 1..606: mol_type = other DNA
atgtccgagctctcccaattaattcagatcaacaaaaacattgaaaaacagaatgaggagatcatacggctacttaaagtgatcgcttgcgagaagcaagagggcgaaaacagtgacaagtcagttattgatctcggcgagctgtacttggaggacgacgcgagtttcgaagccgagccaaaagaaggggaaatcgagaacctgtggcgcgtgggatctctcctggacaactcgatcgatgttggggaggtctattttattgaaggcactgacatcttcaggctgagcgtgaaaaataacgagacaagcattgataacctgacaggggacggccaggccaatatatttgcccttgaggaaacgatcgccaacgagtccgtcaagaacaataagagtctggaagacagcaccgtcatactgagcagcgaacacagccagaacctcccggagaccctgaagatctgtgtggaacagggtgctaagaaggtgtacatgcacctattcgcatcatcccagctggtaggagcaccccagagccttatggagctgatcaagtttgatttctacaaaaataatgaacatctcgtggagaagttgttcaagtga

SEQ ID NO: 9526 - DNA, 306 bp, synthetic construct
  source 1..306: mol_type = other DNA
atgagcaagttttgtcccaaatgcggagaagagcttgtagatgacgccaagttctgcaagaactgtggcgaaacgataaaaacagagcaggagacccaaaacaatgaggtccagaatgtggaaaacgaccataaaatagctctgatcctgggctatgtctgcgccattctgatcccactgtttggactcattttcggcatctacctagtgacccggaaagactccagcaaggcgaactaccacgggaagatcatcattgggattgcaattgtgatctggatcatcagtttcctcttgatgatgtga

SEQ ID NO: 9527 - DNA, 267 bp, synthetic construct
  source 1..267: mol_type = other DNA
atgcgggaaatctccatcgattcagatttcgacgtcggtgaaatcacaagcaagatcaacaagctcatgagtgagtggccaatccagcttctggacatcattggccccaactggattgtgtttggctacgacatgaaggtgaaattcgtactgatattcgacgccgactttaatgatttggagacccagataaaactggaggatctgaggctaaacgtgatccaccacattgagagcctcaagggactgcatatcgggattacgtga

SEQ ID NO: 9528 - DNA, 339 bp, synthetic construct
  source 1..339: mol_type = other DNA
atgaaaaataaaaacatcctgctcattgccatagcagtgctagtggtggccctcatcgcggtgggagcttacaccatgtttaacggcaatacccacctgaacgttacagacaacaccactgggatagacaacagcaccggcatcgataacaatacgactgtggtcggagataatagcccacttgagaacctgaccaacaacaacacaacatataaggtatacaatccccagagtgactcctatgtcccggttatcggggaaaagttcgacgaggaagtgaaccggtggtatacgtacgacgatcagggcgtccgctactacaatactaggattaattga

SEQ ID NO: 9529 - DNA, 1092 bp, synthetic construct
  source 1..1092: mol_type = other DNA
atgactcgtcaggagaaaatcatcaaaaccagtgtgatagggatcgtggttaacctgatcctagtggcattcaaggctacaatcggaatgttagtgaatagcatcgccatcaccttggatgccgttaacaacctcactgacgcgctgtcttccattattacgatcatcgggacaaagctggccggcaaagcgccagacaagaatcacccctacggatacggtcgggttgagtacttcgcctcggtcatcattgcagctatcgtgctctgggcggggattacggcctttatggaatcctggccaaagatactgaacccggatgccacttcatataccgccgtgtcactcgtcataattgctgtggccgtgttagtgaagtttgcccttggaaaatacgtaaagaacgtcggcgaggatattaactcacaggctcttgttgcctcgggcagcgacgcattcttcgatgcagtgctgagccttagcaccctaatagctgctgtcatttccgtcttcttccacgtgtctctcgaaggcattctgggcgtggtcatttctatcgtgatcatcaaggccagtgtcgacatgttgagagagacaattgacagcatgatcggcagcagagtggactcagagctctcccggaaactgaaagagtatatctgcgaaatccccgaagtgtacggggcatacgatttgagtctccataattatggtcctgaggatatgcgcgggtccgtgcatatcgaagtggacgacgatctgaccgcttttgacatccacagcctgacccgaaacatcgtctacaaggtatacgacgagttcagcatagtgctgaccatcggaatttatgcaaggaacaacgactataaggacgtccgggaggatctgtacaatatagccagcaaatacgaggaaatcattgagatccacggctttattgtaaataaggatgaggactacgccacatttgacattatcgttgatttcgatgcggaccgcgagaaggtaaaggaaaggatttacagtgaaatcaagtccaaacaccccgaactggactattatattatcgatgactatgacatatccgattga

SEQ ID NO: 9530 - DNA, 540 bp, synthetic construct
  source 1..540: mol_type = other DNA
atgagcatatatgactttgaagttaaggatggagagggcaacacgatttccctcagccaatataaggataaagtgctcctgatcgtgaacagtgccaccgaatgtggattcaccccgcagtatacacagctgaacgaaatctactcagaatttaacgaagacggtttcgagatcctcgacttcccttgcaaccagtttggcggacaggcacccgggaccacagaggagatcaccgaggtctgccgctccaaatggttagtcccttacgctatcttcgacaagattgaggtgaacggggagaacgaaagcccactgtacacatacctgaaaaaagagcagcccttcaaagatatcacgggggaaggctcggaagagtttaagaagattttggagagcataaatcccaattacatggacaatgatgacatcaagtggaatttcactaagttcctggtagacaggaagggcaatgccattcaacggtttgagccaactgaggatctgaacgacgtgaaggaggcgatcaaagcccttctatga

SEQ ID NO: 9531 - DNA, 2688 bp, synthetic construct
  source 1..2688: mol_type = other DNA
ttggagtccgacaacgtgagcaagaacatcagcacttcactcaataagacacagaataagaccctcatcaacaacgagacctacaaaaagaccaccctggagttttccccgatcatcactgagtatacgtccggaaacatcatttatacagtgaaagcctacagcctcttgaactacaatggaatgaagtataaagaccccaaatacaactccctgattaagataaaactatacaccggtaactctttcaagagctatagcagccacatcgacaataacggcattgcttctatcaaagtccctgatctgagcattggctatcacaaggtggagatcttcattgataatgtgcagggagctacatcatacatcaaggttattaagagcactactaaagtatatgcgccaactacaattataaaatttaagaaaaatatgaattataagatcaaggtcgtcgacagtcataataaccccgtaaaaaacatcatactgaaagttaaagtttacactgacagcaagtataacatttatagcattaagaccaattcgaaggggctcgcaacactgaagattaacaagttatctctgaagacgcacaagattgtgattaccactaacaataaaaactacaagattaacaaaaactcaaaaattctgattaaaaagacaatccctaaaaagattgaaaccttaacagtatcctcgccgaacaagacaatacaaaggggtacttccttcacgatcaagctgacagatgattataatgatatcgtgaagaaagtgagcatcaaggtcaatatatacacagggaaaaaatttaagactttcaagatcacaaccaacaacaacggggtggccaaactgaagaccgacaaactcagcctcggaacgcataacctgaagatcgcatccaacaacaaaaactacaaatttcacaagactttcaaaatcaccctcgttaagaccatcatccatgatgacattaaaacgctggtgttaaagaatatcacgtactaccaaacaaaggacggaaagttcaacgccaaactggggtggtactctaaagtgggcagttcatatcagattcttcgcaaaacaaatgagaactacaacataatctcgaccgtcaagagcaattccagctttaccaccttctacgataagatcgacggcaacgccagctacacatactctgtgagggagattattgtgaagaacaacgacatcatactggggccatacgacaaggaaggtctgaagctcttgaagagtcccaatatcactgctgacttccagaatctgaaggccgagatcacgtggaacaaggtggagggagcaaccaagtatatcatcttcagaaaaattggccgtgatgcgaattttaaggctatcggcatcgtgaatagcaacgtcctgaactacactgacttctactataagacccctaaacaactcaggagtatcctgaacagcaacacgtttgtcgaccccagttttaataacttgttttacacagtgcgagcttgcactgtcaagaatacatccggcatcaaccagataagttacggatcataccttatcgacggcgatttccacctcgaagcacccagtatcatttccctgaaggacaatgaaattaagtggggtaaagtgccaaacgccgatggctatctgatcctgaagaagaacagtgatgacgacgagtggaccattatcaatcaggtggcccaaaatgagtccaatacgatcaccttgaagctgaacaacatcgagaacagttcgtactattctgtgaaggcctttgccaagaaaaatggggagatcatttacagcaagttcgactcgggctttagcctaaaaaactactcaaaagacaatagcaagtataagattttatatttcggagatagcatcacgtacgggtcaccgtacaagtcaaattcaaacaaacacattttctccatcccctatagagtaggcgaactgcttggctgtgtttactataaccctagcattccagggtccacttaccatgatctggggcagaaggacggaaagaacatcgaaaacaccaaatactacagatatcggatctgccgcgaggtggttgaccagatatctatcggggaactgcccggaaattggaaggagctcgataatttgaagaacagtgagggcataaccaacacatacatcgatgactacaatattgttgtactcgccgctggaaccaatgattaccttgacaattccatactgggctctataaattctgtggatacccacacattcaatggtgcccttaaccatattctgaataaaatcgagacggcgagcaaaacacgggtggaacgaggggaatcccctattaaagtcatatttgtcgatctatgctactccgaccgggcctacgataaaaccataaaagaaaatcgcgatgtcaccaaaaacaagatcggtctaaccttgaacgactatcagaatgcactcaacaagcagtacaacaagtggaagaacaataacttccttaccctctataatttcaagacccgggactataatatcgtgaaccaggagaactgtccatacactacctccgacaacctgcacttttcaaagttcacttatggccagtatggcaacgcattcgctagttttcttaaagaaaatatcttctataactga

SEQ ID NO: 9532 - DNA, 1317 bp, synthetic construct
  source 1..1317: mol_type = other DNA
atgaagaagatcatcacctatggaacatttgatctcttccataagggccactataacatactgaagcgcgctaagatgtacggggattacctcatcgtaggagtcactggcgaaaattacgacatagggcggggaaagttaaacgttaacgacagccttgccacaaggattgaaaacgttcagaaaaccggttttgcagatgagatcatcgttgaggaataccttggccagaagatcggcgatatcatcaagtacgatatcgacagcttcgtcattggtgatgactggaagggcaaattcgaccatctcagcaagtattgcaacatgatttaccttgagcgaaccaaagggatctcatccacccaaatccgggaggagaccttcaatcagtacaccataggtatcgtgtgcgacttcgtcgacgacaaccagatcatcaatgaggccaagttggtgaatggcttcgaagtcaaaaacatcttttgcgaggacgaggagattaagaataagtttcaggagaagtatcacctggaaaattcgtgtgaggaattttcagagttgctggagttgtccgatatcatttatgtgcgttgcaatatctccaaacgcttcaactatattcaaaaggctctgaatgccggtaagcatgtgatatacgacccccctgccactttcaactacaatgaactggatgagctaatacacctggcggagcagaagaacgtaattctgatggaaaacattaagatggtgcacatttatgtctttaaccagttgctgtggatgacccaggggggcctcatcggcgacatactgtcctttaactgttcaattagcaagattgacataaatcggccgaacctgttctacgacttaagtgtgtacacactgctccccatgcttaaaatcatggggcaagactatgaaaagtatgacttcatcgtcaaaaaagatggcgaggatattgaatttgcaagcatgaacttcgtgtactctaatggaagaagcattatcaatgtgggcaataaaattcgggtggacaaccagctcgagattatcgggacggaaggaactattaggatgaaaggcgagtggtggcgcagtaggaacttcgagatccactacccagagagccaggaaatacagctgtacaacacaaacttcgaaggaaacggatttaagtacctactccgcgagctgtccagaatgctggataataatcgaatcgacacgagaagtatcttcaaagatgaaagcctgaaaattgtgaaaatcctcgagcaggtgaaaaagatcgagaacaacaacggggactga

SEQ ID NO: 9533 - DNA, 1068 bp, synthetic construct
  source 1..1068: mol_type = other DNA
atgaaacacctctttaccatcggacccgtggaaatgtacccggagaccctgaagattgggggcaagcaggtaccttattttcgcaatgacgagttttccaacatcatactgtctattaataaaggcttaaagaagctattgtttaacaaaaacggcgaaatcatccttctaacatcgtcaggcacaggcgccatggaagcaactattatgaactgcttcaccaaggaggacaacctcatcatcattaatggagggagcttcggccaccgttttacccagatctgcgacgtccacgggattccatatgagagcgttaacattatcttcggagagaccctgacgagagagatgatcgaggataaactcaacaatgggaagttcacggggttgcttgtcaacctggacgagacttcaaatggtcagctgtacgatataaagatgctctccgacgtttgtaagaagaataatctggtgttcgtggtggatgccatcagtgccttcctggccgacgaagtaaacatggacaaatactctattgacgcggtgattctcagtagtcaaaaagctttgagcctcgccccgggtctgagcatagtcgccctgagcgagaagatgctgaaaagggtggaggtgatcgattcagaatccatctatttcgattttaaggattatttgaaaaatgctgagcggggacagaccccttttactcccgctgtacgagtgatcatcgagcttgaagatatgattaagcgcctggaaaaaaaaggcatctacaacattattaagcatacaaacgacatcgcttcttacttcagaaagcgggtgaacgagattggacttgaatacccctcctaccccctgtccaatgcagtcacacctataattttcccaaaaaacaatgccgacttagtctacaagaggctgatcgaggattatggctttgtggtgaacccaagtgggggtaacttcgcgaagagcatgttccgggttagccatgtcggaaaccagtcgatcgaagactgcgaggaactgatcctcgcaatatccgagataatcaagaagctgtga

SEQ ID NO: 9534 - DNA, 1659 bp, synthetic construct
  source 1..1659: mol_type = other DNA
ttgagtaacatgaactccatccagaagaacctgttccagctgcttgtggagttcgacgagatttgtaagaagtatgatatcaagtacctgctggcagctggtgctagcctgggtgccgtcaggaatcacagattcatgccatgggacgacgacattgatctctatatcaccagggagaattggaacaagctgagacacatccttgagaccgaaaaggacgtgctccctaacggccgttcttttgtgtacaaggagaacaccccatattactccaaccccctcccaagatatatcaacgataccacaaccacaatgtacagaaaccaagccctcgcgggcaaagcatgtggacagcacctggaaatatttatttttgatcctattccccggggcgagaaagagaagcagaagtacctcgacttactccacgtgtacacagagctgctctcaccttattttatcgtcaacaagcatgccacttatgaagactgggaaaagcactacaagctctataagaagtattgcgatcgcatagacaaagagggggaagaaaaggtcttgaacgaactggaaaatacattgcagcagtactccatcgaagactgcgacgagtactgtatgtgttggggaaccaaagactacatctacgacaaagagctgttccaggaaggacaaatgggactgttcgaggggaaggagtttccgatcgggaagcatccggaagggattctgcgcatcgcttatggtgacagctggatgtacattcccgagattgacgaacaaattgttcacggggggatcaagtatgataacatctccttcaaggaatatactgataagtaccttcataaaatcaaccgggactccgcatttgaaaagttcaagatcaataagcggaacaacgtagatctgtacaatgtgcgcgagaaagtccgaatgctgattgccaaagagaaggtccaggtgggctgcatgcatttcaaaaataatctgaaagaaaacgaagagctcttgcggtcattgctggagaatggcgactacctagaactttctgaacgctttgaggagtactcaatcttgcagagcatgaatgaggtgcagaaatttaaaatttttgtgccaattacggataagaatctggccacattccttctgaacctgttgaagcagggaaaatactaccagataaacaagtacctgaacatccgaaaactcaacgaaagccccctgacgaaagagctgataactattgagaatgaagtagagttctgcaggaagcttagcatcgctcgatacgataataaagatgaggagctcgtgcaaagtatcatcgacaagtacgacggcatattctccgatctcctagacatttatcgcgccaagctatggataaaagagatcaatgccaagtcgagtaaagattataaggatatcaacaatctgtgcaacgaaatcttaaagaaatatcccttcgacggcgagaccatggcgatccaggcaaaggccaagtcggagttaggccaggagaacgagagcctagaactgtacaaaaaatctattctgaacacgaggaatggcctcatatggcagaaagttgaagacgagagtggaattagcaggatggaaatggagcgggagcttatcgaggaggagaattga

SEQ ID NO: 9535 - DNA, 1203 bp, synthetic construct
  source 1..1203: mol_type = other DNA
atgaagtcaaagcaggatattcagctcgagctactccaggagatcgacgatatctgttcgaagaacgacctgaagtacattttcgtcggaaagaacgccttcaatgcgtacgtaaatcacacaattaagaacaataacgcccacgtgtccgtcgctatgacactgggggacatcaatagattttgcaatattattgaaaaacagaacaaccctaatcgatatgtggagagtatgtttaccaaccccaaatacatccccctgtacataagctatggcaacgaaaacactactgactaccacatgatcatcctcaataataatctccatcacggaatcaacatccggatttatccaatcatcaaatccgtcacactggatgacgaaaaaattaagataatggatagtaaaatatataaggaatataagtttcgcaaattcctgaacaagaagatcataaacaaaaagttcttgccgataaagatcggcatcagcctgcttaataatatctacaacattagcgggtttaggaaaaaatatcccgataagatcttcaacaagatctacatcgataactgggatgatatccagaactattccaaggtacgcatcggaaaaaagataatcaactccgaatatttcaaggaacttacacggtacaaggtggacaatatagagctcaactatcctaaggataccgacaactactttaaacaaatttacggcagaaacatagagaacgtcaacgtggtgctgaagccagagaggaagaatgcaatcgtggatacggaaatcggctacaaaaagatcatcaatgagacgaaagacctgctggacgaaattcggagcactcatgaggaactagtgtgggggaggttcaaggtgcgcagagagaagaagtgcgtcgatgacgtttggaagctggttaaaatgaccaacagccaaattaagtacattgactttttcgaggagaacatcgactacctcttaagtttggaccttaatgataaaagccagtttgaggagatggagatcattcttaacccaattatcaaaaaactgcagaagtacgccaataaaggtatgaccttcagcattgacgagaagaccgactcattaattcgaaaattcctgttgctgaaaaacaatgagaaactgattaataagatcgacgaaattaacaagctcaagtacttcgtggaatga

SEQ ID NO: 9536 - DNA, 792 bp, synthetic construct
  source 1..792: mol_type = other DNA
atgataatcgagtgcacaaacgacaacattaaaaccgtatttaattatattggggaggattacggaaagtgcctgtacatcttcatcgacctcaaaaaatatggtttggatgacgacaattttaacgtgtggattcagtacaataacgataaaatttgcgccataattagtgagtactacaacggcatccagatttacagtaaattcgaagatctcataatcgaggaaatcgtcaaattcattaaacagaaggacgtgaagacgctgttttccatcaagccaatcatcaacaagatcaacgaatttctccccaactataagcaagagactggcatcgttggtgagctgaagaagttgatcttcgaaccaaacgtccacgcttacagcgcacccataagcgagctggaagagattgtcaagctcgtgtccgaagacgaaaatatcggaaagccctatggctacgatagcctgttctcacagtactatgaaagaaagaccagtaatttcggccgaaatttcgttttacgggacaagattaataacgaaattatctgtcacgccgggacctatgccgagcttcctgagtttgcagtgatagggggggtgattacatcaaagcagtacaggggaaagggattcagcaagggcacactgagcgctctttgtcatcaactaaaatccgagaacaaacgcgtgtttagctactattacatcccgagcgcgaccaaaatgcacactagcgtgggcttcaagaagatcgaggagtggtcgaaactgtccaagatcgactga

SEQ ID NO: 9537 - DNA, 426 bp, synthetic construct
  source 1..426: mol_type = other DNA
atgtataagaaaattctcttgccgactgacggaagcgggtacgcagatcaggaaatcgacagggtgaccagactaataaatgaggacggtgagataatcatcctgtcggtggcccccaaactgagcaccagcgcctttcaacggcgcaaggacatcgagcagctcaataagacgttcttcgaggaagcggaagatgtggtcgagaaaatgaagaacaagtttcctgaaaactacaacattaaaaccattacaaagtacgggttcccagctgaaacaattaccaatactgccaaggaggagggcgctgagcttattgtcatctccgccagcggaaagagtggcatccatcagttcgtgatcggctccgtcgcagaaaaggtgctgaaactgtcagagatcgatgtactgctcgttcacaacaaatga

SEQ ID NO: 9538 - DNA, 387 bp, synthetic construct
  source 1..387: mol_type = other DNA
atggatctgaagaagattgcaattgtagtgagcatactacttatcatcgctattggcagttttgcttacatcagcttaaacacccaggagacaaaagtggacatcattacgcaaaacaccatccacaatggggacattattaccgtccagctgaaagatctctaccggaacggcatccccaatcaggcgatcgacttgaaaatactggatgactccggatgggcccacaactataacgccaccacagatgagctggggatcggtcagatccagatactcggcctggaaaatgggaattacactgcccacgccaagttcaacggcactctgtttctcaaggaatctgcaaaccatgtctcattcgaggtgacagacggatatttctga

SEQ ID NO: 9539 - DNA, 2610 bp, synthetic construct
  source 1..2610: mol_type = other DNA
atgaacatcatcaacagcacctcggatttagattacgattttacaatcgtcctctacaatatcgagaactgcatcgaagacagcattaagtccgtaatcaaccagaaatacgatttcaagaaagtggaaatcatcttcatcaatgacggctcagataagaaccataaaatagccctgaactatcagaagaaatatcccaagaactttttcatcgtcgagaatgacgagaaagacatggccgaaagcctaaaccttgggctgaatcacagcaagggagaatatattaattttctgaactcgggcgacatactctccaacgacacactgtccgaggtcaattcatttttcagtaaggtgacgagctcagacgtggtgggcattcgtgtagacgaagggagggaaaaatttagcatcgactatagcttcataaagagcaaccagattatcgatatctcccagtaccctgaggttatcaattctattctgagttcattttttattaaaaaggagagcgtgaatgtgaactttgacataaacccttacgagaaatctgacttactgttcatcgatgaactactaatcaactccaaaatcggctttgtgatacaaccaaaagtgcagaagagctcctccaattatctgattaagaacaagagtaccctgaatcagttcaaacactattacgattccatctacacgttctgcaacgagcagctcggctatattccgaactacatccagtataagatagcgatcgagcttgcaagcattgttgagatcgaggacatcgacgacatcctgattgacaacatgactgctagtgatgcctacagttacatcaataaggttctgaatcacatcagtctgagcaatatcaaaggcaatatcttcattaaccagcacacacagaacttcctgctctatctgaaaaataaggatttccacattgacgtggatggaaacgaagttatcttttactgcggcagctatgttcttaatgtcttgacccggcagaacctttggttggacattatagagatcaaggaagattacattaacttctccggaagtattacctcctactgtgaatatgaccacatcagtattgaggctataaaggaagctaatggtgaaactgagatcattcccgtgaagttcattgactacagtacaacggagagaaaagtgaaaaagttcctgtccgtcccctgggtctatagctataactttgacgcccacattcaaatttctgactgtgaaaattgcaaaatctcatttaggtacacctactccgagaaagagactgggattactgtcatgccaaacattaagtttcgcaaatttgcctccctgtctaagtttagccactacttcatcaaggattctagaattgtcttgttcacacaaaactcattcctggtaatgccttactcattgaagaaggtgttcaaatttgagttcagtagcatcaaaaaaatacttcaaagtaccgcgaaaaacaaaattaaaactattggttacaaggccatatacctagcgctctttcactacatgaaaaacaagaagatctggctcatgggcgatcgcaaggagttcgccgatgacaatgcagagtatctgttcaagtattgcataaaacagaaggatgatgtgaacaagtattttgtggtcaacaaaaactcgccggactataagcgacttaacagagaatgtgggaatattgtggccttcggctcgctcaagcataagctgctgttcacatttagcgataagctcatctcgtcacaggtaaacaagtttatcttaaaccccttcctgagatccaaccagttcctctacaatggtgtgctattgcacgacgagtgtttcatccagcatggaatcatcctgcacgacctcagcagctggattaggaagtacatctacaatctgtcgctgttcgtgacaagcgccgaagcagagtgggagagcatcgccaataccaactacaattttgacactgagcgaatacagcttctggggcttcctcgctacgacaacttggtgaacaatgctgacaagcaaatactctttgtgcccacctggaggcgggatctggatgacccccaactgctcgtcaattccgagtacttcaacaacatcaatagcatcctcaataacgaaaaactcattaagctcgcacgggactacggatattctctcgtgttcaggccacatccagagctgtggcgctatctggatttattcgacatttcagatgaatttcggatctctaatgagagctactccaccttgctgagtgaatccagcgtcatgatcaccgattactcaagcattgctttcgatttcgcatatctgaagaagccactgatctactaccagacgcaggactttgagaacttccattacgaaaagggttatttcgactacgagaccatgggattcggggaaatcataaaaacccaggaggagttgatcaacaagattgaattttatatgaagaacgggtctgttcttgaggacaagtacaagcagcgatccgctaagtttttccgcttccatgatcggaataactctaaaagaatatatgactggctgatcaagcattga

SEQ ID NO: 9540 - DNA, 2604 bp, synthetic construct
  source 1..2604: mol_type = other DNA
atggcggacaacttcaagttttcgattatcgtgtcaaacctctcgggatacaaggactctattgacagcattatcagccaagaactggatttcaggcagaacgtgcagctcataattattaaggatagtaacatccttacaagcgacatcgatgaatacatcacggaatatccaaacaacatccttgttctggagaataaggacaatctgaactcacgcaatttcgcacttcgccatgctagtggggaatttattaatttcatgaaagccggagataccttcgacaagtcttgcctgaagacagtgaacgacctgttcaacagcaacacggatattaacctggtgtccatagcgctctttgatcccatctacaaaaacatcatatacaagacaccactgtccgaaaaccgattaatcgatatcaacaaggtaaataacaaagagtttaattactactttcacctgccgatttatgcctcttttatccggggaactgactactatttcgaagataaaaatattgacgagaacggaatcagcgtcacgagtaaaatactgatcgacgacgacaaattcggctttgtgaaggatattttctgctaccacaaccctgagagcgagtttagtgaaaatataaactacagaaacgtaatgggaaaactgaaactattgaacaacatcatgcagtatgccgatgataatctgaataagaaccctgagtttctgcagcacattgtggcaaaggagctggaatacatcgttcggatcgaggacctcagccagatcagtactgacctcaataagttgaacgagttctggaatctgatggacgccgtcttaaagaatgtgtctaaaaaggctataaagagcaacaacttcctcgacaacttcgtcatctcatttctgttatttatcaagaataagtccttcgctatcgattgcagtcagcataaagtgttttttaagaccgaaaattactccatgcttaatttgcacaaccagaaattgcactttgacgtgatcgagattaaaaagggcattctcaatctctccggttatctgaagagcatctgttattccgacaacatttccgtcgaagcacttctgaaggacgagaacggtgacgtaaaatattacaagggtaagttcgtggagtacccaacaaccaatcggaaaactgtaacttttctgtcccatccatggatctttagttacaatttcgacttcaagattcctataaacgaaaagaaaatagaaaagatttcattcagaaccgtctaccacgagaacagcgagtacgtcatctggaacaacaagatttctcccaggaaatattcaaacttaagcaagttctcgcattacagtgtgaaagagaacatgctggtgctccttaaagacaactcattttactccatgcccctgaacgccaaaagcaagtacaagttcgacctacgcgccatcttccaaatccttaaggagaggccccagtattaccggggaggcatattctaccggacgctgataatgcttctgtatccgttttggaagaacaggaagatctggatgttcatggatcgacaggacttcgcagatgataatggggaacacctgtttaagtatgctctcaaccaaaaggacgacgtggataagtattatgtcctggataaaaatgctagcgactttaaaagactctccaaaagcttcaagaacgtcattgcctttggcagcttcaaacacaagctgctatttttgttctcccagaagattatcacctctcagcctgccgttagcttgtacaatcccttctttagtaaaaacattacaatgtttgccggcttctatccgaacgtgtacttcctgcagcatggggttacaaaggacaacgtgtcctcttggctgcataaattcaatcgaaacctcagccttatctcaacaaccagcgacctggagaagaagagctttctagacgtcggctacaactatgatgaggatatcatccaaaccctcggtttcacccgttacgataatctcaatggggagaacgcgaagaaacagatcgtgatcatgccaacctggagaaattacattaaaaacgaagaggatttgaaaaattcagagtactttaagcgctggaacagtctgatcaacaataatgaatttattgagtacgctggcaaaaaggggtacgagatcatattcaaacctcaccccaacctatacaaatttatcgacctgtttgacaagaacaatcacgtgattatcgactacgttaagaagtaccaggagatattcaatgagtcggccctgctcattaccgactattcctccattttcttcgatttcgcctatatcaagaaacccttgatcttctaccagtatgcaaatgactatcactttgattctgaaaatgggtatttcaattatgagtccatgggcttcggcgaagtcattaaaaacgaggatgacatcgtgaacaagatcaagtactatctcgacaatgattgtgttatggaagatctgtacaggaagcgggtggacgacttcttcaaatacaccgatcgcaataattgcatgagaacttatgagtggatctataagaactga

SEQ ID NO: 9541 - DNA, 1071 bp, synthetic construct
  source 1..1071: mol_type = other DNA
atgtataaagtggtcaatggtagaaaacgcatcttctacctcgacttcatcagagcactggctatcattctggtcgtcctggctcatgtcacaagggcctttttccagaactcccccgccggcagcttcaatatgtgctttgtgtcgcagttcatcgatttcggggttattggtgttccactgtttctgatgattagtggggcccttcttctgaacaaggactacgagcttggagatttcttaaaacgaaggtattctcgcgtgctggtgccattcctgttttgggcgatgatcttcccgattagcaaaattctattcgaagggcaggtggcgactgtggctaattttatcaaaatgtactttgactctaacttttggtttgtctggatgatcttgggtgtttacctgttcatccccattataaattccttcattaaggagtacgacatgcggggcgtagagtacttcttgctgatctggggcggagtgatgtttctgaacaccatcgggcagtacccctttcaccaacttgagctgagctattttgcaggatacctgggctacttcgtactgggctactatttggccaacaagaagttcaggctctccgattcaaagctgttagtgatctccctactgatatttctaacgttcacattcattaacatcgactatacaattaccatgtgtatcctcaagaataagctcctctactataagtacgaaaccattgtgaccgtcgtgcagtctgcaggattgttcatgttcatacgttattttgctctggtgagtagcaacaaacccgagtcgattaaaaaccggatttacctgttctttaaggactcattcatgttcaagatcatattttcaatcagcacgttcagctacggcatctatctcgcccactataatcctctctttttccttaaatacgaatataagatactcttcacttttaaccctattatctggctcccaataatgatgatcgccatcatcgggagttcctggttcatcttgtggatttttgataagatacctggcctgcggaacatcaatggagcccactga

SEQ ID NO: 9542 - DNA, 819 bp, synthetic construct
  source 1..819: mol_type = other DNA
atgaataagaagataggtttcattcttgccctggtagtgatatccctcatgatgtgctccacggtgagcgcagggttgtttgacttcatgggcggcagcgactcaagcaatgatgataatacattcgtcgtggggtttgacgcagagtttccaccatatggctacaaagacgatagtggcaactacacgggcttcgacctcgacctggccaaagaagtctgtgaacggaacaactggacattcaaggcccagcccattgactgggacgccaaggatgtcgagctggatagcgggtctattgactgcatctggaatggatttaccatggacggcagggaagacaactacacctggtcgaacccttactttgacaacaaacagatcattgttgtgaagtccaactccggaatcaatacccccgccgatttgaaagggaagatcgtggaaacacagaaggacagctcagcgctggctgcccttcagggagacaacaagactctcgctgacacatttggaacactgaccgaagttgccgattataatactgcgttcatggatctcgagtccggggcttgcgacgccatcgctatggatatcggggtggcagagtacgatattaagaataagaacgccacgagtgattaccagatcctaaaggagagcattaccagtgagaagtatggtataggcttcaaacagggaaacaccgatttaaaagacaaagtccagtctaccctggacgacatgttcaaagatggcactgtggcgaaaatcgcacaaaagtatggtatctcagaggatgctctgatccaaccgtga

SEQ ID NO: 9543 - DNA, 651 bp, synthetic construct
  source 1..651: mol_type = other DNA
atgatattatccaacgtgatcggccaattgctcggcgggatggttacgtcggtggagatctttctgctgacattgctgttctctctgcctctcggtctggtggtggccggcggaaggatgagcaagtttgcccccttgcgatggctcatgaagatatacatctcaatcatgagagggacccccctgatgctgcagcttattatcgtgtttttcgctccgtactatgtgttcggtatgagtctaagtgccgattaccggtttatagcggtcattattgcattcacaatcaactatgctgcgtacttcgccgaaatctatcggggcggaatcgaggctattccaaaaggccagtacgaggcggctcaggtcctaggatataacaaatttgaaacctttttcataatcgtccttccacaggtgttcaaaatcgtgctgcctagcatcactaatgaggtgattactcttgtaaaggatacctccctcagcttcgtgatcgccattcccgaaatgttcaccgttgccaagcagattgccgccgccgacgcatccattgctgcactgctcgtggccgggatcttctactatgtatttaatgtcatcgttgcattcgtcatggagcacctggaaaaccgcctggactactacgactga

SEQ ID NO: 9544 - DNA, 684 bp, synthetic construct
  source 1..684: mol_type = other DNA
atgagtctcctggaaataaagaaccttaagaaaagcttcggagacaatgtggttctgaaggatatttccctgaatgtagacaaaggggaggtcctgtccatcatcgggccaagcggaagcggcaaaagcacactgttgcgatgcatcaccgacctggaacaggaagacagtgggattatcaattttgacggcgcgttcggattggtgttccaagactttaacctcttcccacatcacagcgtgatcaaaaatattacgaacgctcccctaagagtgcagaagagggacaggaccgaagtgttcaaccacgcacgccatctcctcaagaaaatgggcctggaagacaaggaggatgcatacccttgtgagctgtccggcggccagcagcagagagtctcaattgcccgcgcgcttgccatgaacccggacatccttttctttgatgagcccaccagcgccctcgatcctgagctgactggagagattctggctgtgataaagcagttagctgccgataacatgaccatggtcatagttactcacgagatgaattttgcccggaaggtctctgactcgatcatcttcatggagaacggtgtgatcgtagaagaggggtcacccgaggaggtgttcacatccaataacaagcggatgcaagaatttctaggtaaatttaacgattga

SEQ ID NO: 9545 - DNA, 1512 bp, synthetic construct
  source 1..1512: mol_type = other DNA
atggaaaacaacgacgtggactatctggtgattagctactacttccctccccggttagagaccagtgggttggtagtggccagaaaaattatggagaaaaacctgaatgtggatgttattcaaagtgcctacgatgaaagctccgatttcaacgaaatcatcaacaagcacatcaacaaccgattcccaatcgacatcaagactaaacccgactatattccattcatttttaaatacatcgacctaggcctaaaggccatcaagaagaactataaaaaggtgtatagcaggagctatatttactcaaaccatttcctggccttggagtataaatttaaaaatccgaatgctgaatggacggcggaattttcagaccccttgcttctgaatctctacaccggtgcgatcaagaactaccccagggctattctggacaattcggattatatcaataagctgaatgagaaaatagagaagttcaacgaggtcagtgatacggactttaaggctttggacaatcccaacaatacattctttatggccgaatatctgacattcatatttgctgacaaaatcatattcacaaacgaaaaccagagagaggtcatgctgtccgtatacgataacgagctgcgcgagtttgtcatgaataagtcaaagctggaagcacacccgactattgataaaaagttctacaacttcaaagactgcgagatcaggctcgacaataacaacatcaatatagcgtatttcgggacatactattacattagacattttgagagcctgttctatgcatttgaggcacttaatcacaagtataaagataaaatcaagctgtactttttcacgtcccgtgccgaattactcaaggtcgcaaccggcagtctgaagattagcaataatatcatcatcgagaaaccactcaaatacttcgagtttctcaatgccactaccaagttcgacattttactgatcaatgatacaatcaccaaggggcactttaaggtgaacccatacctgcctagcaaatattccgattacatcggatcgggaagcgacatttggggcatctgcgaagaggacagcatattgtctaagaaagagctgatgtataagtctagcatgactgactaccagtccagctgtgacgttctcatcgacattctaaacgattatggatacgaggatcaggactactacttcgaggataacatatacgagaagcggatcaacgaactgaactggcgcttcggtttcgaatttgacgagcgcaagaaatacctttcccgatacaacaatctgaaggaaaagaacatgaccctgaatggcgaactgcagaccctcatgaacaagaacaagaaacttaaagccgaaaatgatgtgctccggaagaaaaataagaacctcaaaaaggagaatgagacccttgaatccaagtacaacgagattgtgaactcaaacagctggaagataacagagcctctccggaagctgaagaacagtaaatga

SEQ ID NO: 9546 - DNA, 723 bp, synthetic construct
  source 1..723: mol_type = other DNA
atggtcaaggtgtcagtaatcttaactgccttcaatgaagagaaatacattgggaaagctatcgacagcatactgaaacagaccctgaccgactttgagctgattatcgtgaacgatgggtcgaccgacaatacgctaaacattatcaacagcttcgaagacgagaggattaagctgatcagtcacgacaacataggcccgggagccagtcgcaacaaggccctgaatatcgccaagggagaatatataatgtaccttgacggggatgattggtatcgagtcgacggcttggagatagcgtactccgaagcaaaagataaggacaccgacttcacattctatcaaatgatcaattatgatgagaaaactggcaaaacatacgagaacgattggttcaacctgaatatctttgacgaatccttcgagaacactgtgttcaacattaacgattttaagggttcaattttcgacttgtctgtgggtgtgtgccagaagatctataatacaagcttcctcaaacggatcgatgctaagtttccagagggcatcctctttgaggacatgccctttttttactacgtgctgctcaaggccgacaagatctccattattaagcagcagctttactaccggagaaagcacgatggaagcatcacccacgtcgttgatgagaaattcctcgacacggttcctgcaggccaggaactgatcttccattactga

SEQ ID NO: 9547 - DNA, 273 bp, synthetic construct
  source 1..273: mol_type = other DNA
atggagaacggatggtatgatacctacaagttcgatctgttggcctataagatcaacgggccccggtttgcgctgagggatattgaagagaactataagattccactgtacatgctgatcaagaaggactaccacagcatcaagcagagcaaatattaccaggactacctagacaaccttggcccggtgaagaaaaaattcttcctggacatcataaagtccaaaaattacaatgactacctcgcactcaacagtgacaaagataattattga

SEQ ID NO: 9548 - DNA, 972 bp, synthetic construct
  source 1..972: mol_type = other DNA
atgaacatcacagtcggtgttattggagcaggtgccctcgggactgcaatatcccaaaacatcagcggaaacgtcgctgagataatcttgcttttaagaaacaaagagctttgcgatgagatcaataattgtagatacaatagccagtattatccgaattataagctgaaggataatattaaagccaccctagagacaggggacctctcaaattgtgacattattttcctggctatcccctccagtgctttccggaaaaccctgaaggatctgcaggatattgtgaagaaagacgttatcatcgtcaccactgccaaaggcattgaatatcccagcttgaagaccatggggaacctgattgaggagtacttcgacgagaattacgtggctctgagcggccctaattttgccagcgaaataatgctcaacctgccaacagtcaccaatatagccagcaaaagttatgagaacagcgtgaaggtgaagaaggtgctgtccactaagcagttcaaggtgaagattattgaggacatttacggaatcgaactttgcggcatcctgaaaaacattaacgcgatcgccaacggtatttgcgaggggatcaacattaatgaaaatgcacgattcgccgtgctgacgaaagggtttaacgatacgatcaccatcataaaagcaatcggagggaagtctgaaacggttcacgagtactgcggattcggcgatctcatattgacttcaacctcccgcgaaagcaggaaccacaccctgggcatactctacggccagaggctcatcatcaatgagaatgcgaacggcgtggtgtttgaaggcaaaaactcgatcaaggccatccgggacatctgtctgaagaacaacatccatagtgacattgtgaactttgtatacgacgtcatgatccgcaaggtaacaccaacaatcgcgttcaacaatctatgggaaaacatggagtga

SEQ ID NO: 9549 - DNA, 768 bp, synthetic construct
  source 1..768: mol_type = other DNA
atgatgatcggcgtgattctcagcgccggcatgggaaccaggctccgacccctgacagacgaaattccaaagccgttgctggagatcaacaacacaaccctgctggagagaatgatcaggaactgcataaatgcgggaatccgggagtttatactgattgtcggttatgaaaaggaaaaagtgttcgaaatcgctcccaaacttgaggagaagcttgacatatccatccggataattgaaaacatggagtacgatgccaccaacacctctgtgtcggcttacctcgccagtagctacattgagaaagagaatctggacgatttcatcctaattaacggagataatgtggtcgacccagagatcatcacgcgtattgcgaagacagacaatacttccctgattgtcgataactttaaggacctcaatggcgaatcatttaagttgattttaaaggatgtaaagaaagccgataacagcatcgcaaacgggataatcagcgaaatcggcaaagaaatcgatataccctccagcacgggtgagttcatcggggtgtcaaaagttatcaaggaggacgttagtcggttcaatgagattcttatccgcctgatcgatgaagacaggcagaactattacgatttcgcctataagcctctctctcgcgacagaaaaattgactttgtgctgactaacgggctgaagtggactgagatcgacgactacaatgactggaagaccgcaaatggcctaatcaaagagttcgagaactga

SEQ ID NO: 9550 - DNA, 1698 bp, synthetic construct
  source 1..1698: mol_type = other DNA
atggctctgatcggaaaaatcaataacctgaaggaatgcctcgacaacaccaagatttacgacagctactactccgccgaaatcgacgaaagcattatctatctggagagccgtaacggcatggatttcaccgggaacatttttcggatcactgaagagctgtccaccggcaaatacggaaactttaagatctatgtttacgccgcaaaaagtatcaaggctaaaatcgagttgtttaagcggaactacaacctgaaaatcacgaaaatcataactgacgaagacgaggctaccaagatcctgcataaagccaaatacatcttcacagactccggcattcgctacaagtatgtgaagaaaccggggcaaattttcgtcaacacctggcacggcactccccttaagctgatgggattcgacaacccatcagaaaaacacaacgtggggatcatccagcggtcgtttcttttcagcgactatattctgttccccaatgagtatatgctagatagaatgagccatgcgtacatgattgataaggtgtatggcgggacattcctgttggagggatatcctcgaaatagtgttttcttaaaggataactccaactataaggaaaagttgaatctgaaggacaaagaagtgtttgtctatatgcctacattcaaggggatcgtgaataataggaaagatgaaaagcagaagaacgacgtcaacaagtttctcaataaactcaattcgaagttgaatgacaaccagatactctttgtgaagttccacccctacaatcagtccaaaatcgatttttctaagtttaatcacattaaggagtatccaaagaacttcgagaattacgacatactgaatgctgccgatgtgctcattacagactacagcagcgtctttttcgattttgcatccactagacggaaaattatcatttttaactacgaccaggatgagtatctcaaagataggggcctgtacttccctcttgaagaccttccattccccaaagtccagaatatcaacgatctggtatgcgagctcaactctccaaaaaactacgacgacacaaagtttaccgaggaatactgcaaatacgacagcaccaacagcgcggagcacatatgtgaaactgtaattaatggtaaaatcgagtgcgattacaagataatcagtaatgcaaacaagaacatcttaatttacctgggaagcatggagaacaaccaggccaagagccagcttattcagatccttgagaacacggacgacaatatcaacatcttcctgtcatttaagccctggaataagaacattaaagagaaccatctgaatctactcaaggatattcccaacacgattgagtttctcccgttaagttataatttgaccccaacattcaaggaaaaggtggagctgaaccgctttataaagaagggcacggacctcaatctggaactaacagagatgttcaacaggaactataagcgccaatacggtgatttcaagttcgacctgatcattgacttcatcagtaatgatcctgagcagtcactgacctatgcctgttctaactcaaagaatgccattatcataaacgaggaaacccaacctaaagtgtacaatcagttcaacaaaatctacagactgtccgagttcaacatcaaaaatatatgtgatgagataatccgatga

SEQ ID NO: 9551 - DNA, 855 bp, synthetic construct
  source 1..855: mol_type = other DNA
atgaaccgactaaaagccgctaagactatatcggccatcaccaaccccccaatcatctgcatccctctttttcttatcatatgtataatcctctccaacgggaacttcaatagcttcatcgttctggagagcatttccctggtgttcacatcaatcctaccaatgatcatcatcgtttactgggctaagaggcttgacacggatcgggatatttcaaatcggaaggaccgcttcacccccttgatcgtgggaatcataagctacttcatcggctttctggtctccctcattctggggaccaatgactttctcaccgctcttctcctgtgctactccattaatacaggcgtggtactgctgataaccgtaaaatggaagattagtgtccacacaacgggactgtcaggtcccgtcggggcccttattttgctgctgggcccgaccggtgcactctttgggattatctatcctattctgatatggagcagagtgacactggaaaaacacacttcggcccaggctattgccggcggagtgcagggcttctttctgacagtgttggagatgtatatgttcatctccctcttcaacttcaatgtgggcaacctggtgcccttgactgattgcatctggtatatcctggccatcatatctgcacctgtgattctaggcatcctcagctacgcacatatgaacaagatcgttttcagtgccgcggtgattattggatttaccgtctttttagaatacgcgccactgagtgcatctgtcatttacattctggtctgtctcacgagctgcctgatcagcttatatgccggggaggactacgagtggtctgacgtgctcatctga

SEQ ID NO: 9552 - DNA, 579 bp, synthetic construct
  source 1..579: mol_type = other DNA
atgaaagttaacctgaagccccatgccatgatgtacccgtcgcccgctgttgtcgcaagcgcgtacgataacgatggcaaggtggacgcctgcacccttgcctttgcagccatgtgttcccacaggcctcccgccgtaatgatcgcaatcaactccaccctgaagagaaaaacattagccagtatcctaaagaccaaggagttttgcctggggttcccaagtatcgaacacgtcagggaggtggactatctcggaatcgaatccggatataatctcgataagattgacaagatccggttcacagctaagaagggcgagtttgtcaacgctcctataattaatgagttcaaagtctcaattgaatgccgcgtgatggacattaaagaggtggggagccacactcagataacgggagaaattcttaacatccaggctgaggagagcgtgttggacgatcggaataaagtagtgctcggcctgctgaacccaatcgcgtacgatgacatcagccattcatacttcaaaatgggtggcaaaatagccgacgggtttaaggtgggtctgaagttccgagaatga

SEQ ID NO: 9553 - DNA, 450 bp, synthetic construct
  source 1..450: mol_type = other DNA
atgaaaagtctggtgacatattatagtaggtcagatataacgaagaaactcgccgaagacattgctaaccaactgaactgcgacatcgaggagatcaagcccaaagtagattaccacggaaagttggggtacgccagaggcattaaggatggtcgcgcagggaaaatcgtggaactggaatcgctgaagtacaatccgcaggactatgacgtcgtctacgttggagggcccgtgtgggccgccaaggctgcaaatcctgtgatcagctacctcaaggaaaatgagggcaagtttaacaacgtgaagttcttcataaccgccggcagcaaaggctttgagtccagcctggagcagatggagaacaccagcatgaagccacttaagactttacagctgcgggcgaaagaggtcaaaaacgaggattacgacctaacatccttcctcgaatga

SEQ ID NO: 9554 - DNA, 471 bp, synthetic construct
  source 1..471: mol_type = other DNA
atgattaatgaagaatttcgactcatcgacgcttcagaacttcccatcagtaaactgatcaccatcattgcaaaatgtcagagcttctacttgaacaacatgttaaatgagtcgggcatcaatagcacacaactgcacattctcttcgaaataagccatcagaacaacattaaccaggagaagatcgccgccagatgcagcatcaacaagggcgccgtcgcgcgctccattaaaaagttggaggacatggggctggtcatcagggagatcgacgaaaacaataggcggcagaacaaggtgtccctaacacaaaaaggagaggagctgctgaacaagagcattaaaatcctcaatgatctggagcaggaggtgttcgacgatgaaacgataaataaggaggaacttcagaacgtgctgaaggagattaccatcaagatcatggaaataactgagcgggaggtaaagaattga

SEQ ID NO: 9555 - DNA, 1386 bp, synthetic construct
  source 1..1386: mol_type = other DNA
ttgagcaaaaatgacaacatcaaaattataacgggtgaccccaaaaaggctattgtgaaattagccatccctatgatgatttccatgctgctcatcatgatgtataatatcgcagatagtatctgggtagcgggcctcggggcagatgctctggctgccatcggcttcattacaccgctgtttatggtgctggtggggctggggaacggtattggcgccggggccaatagcctcatcgccaggaacatcggcgctaagaattacaagcaggctaacaactccggcctccatgccatcctgttgtcggtaattgtcagcgtcatatttaccatcctcattgaaggcttcatggtgcccatattgcagtttatgggcgccggcgatactatccagtacgccatggactacagttacatcatcttcggtttcctgttcatatttgtctactcaggagtggcttctgccatattccggagcgagggagacatgaaacgcagcactattgcgatcgctatcactgccgttctgaatattatcttggaccctatcttcatctacatactgaaccttggtattgcaggtgccgcctgggcaaccgtgatctctgctacgatgtcctgcgtgatcatgagttattggatttgggggaagaaggacctctacctggatttgtcccttaagaactttgattatcaaacgagtttaatggtggacaccctgcaggtggccatacctagcacactggagaatatagttttttccgcccttgccatcattatcaacagcatgctcgtgctcgcagcaggaaccaccgcagtcgctgtctacaccgcctcaatgaggattgtgcagctggcgatgattcccctaatcggccttggcaccgcggtgcttacagtggccggggtggcatatggggcgcacaactacaagaatctgaaaaccgcacactcctacagcatcaaggtggggttcctgatctcaatcattctgggcgcaatcatgttcgtattcagcagcccaatcgccacaatattttcatatactgcggccagtgccagcctgtcaccacaaatcgctactgccatttcggtgctcagcctctttgtccttgctattccacacggcataatgtcgtccatgatgttccagggcgttggcaagggaacgtattccctattgatcacactgctgagatctctgatcctggaaacagtcttcgcctatctattctgcttcacctttggatggggactgaccggaatttacgccggggttgtatttggttgttttgttggaggaacaatcgggtatgtctgggcaaagttattcatccgacgcttcaagcagattgctattcggaaatacgctccccaggagaactga

SEQ ID NO: 9556 - DNA, 441 bp, synthetic construct
  source 1..441: mol_type = other DNA
atggaatttatcctcaacaataagaaatatagcatcctgaaccacgagctcttcatcaactacctgatggtggacaactacttcagaaatcactattccaagtatgactacgagattcgcttcgactttataacacccctattaaataaggagaagatcaaatttgaggacatcctggcgggaactaaaaacctcgaagaattgatagagcgggaggagattaacttcatccccccgggcctgaaaataaaccagcataccaatggcaactttaagatcacctaccaggatctcgattttaacaacatcaccgtgggggaggccattcctttcctgattgcattgaatagccttctgacgtacaagccaattgtcacactgagtcaaatcgaagaagagcttgagaatttcattgaaaagttcaggtcatacaataaatga

SEQ ID NO: 9557 - DNA, 651 bp, synthetic construct
  source 1..651: mol_type = other DNA
atgtactgcccgaattgtaactccgagaacaacgactctgccaaattctgcaagaaatgcggaacccccctaaagaaggaggtttctcataaaaagatcatcaattccatcaacgatgagaagtcaagtaaagacgacattaccaagtacataatcatcgcactcattataattgccattgccctggcgggcgcatttgcctacatcggatttggaaatcacaacgatgatgggcagacccaggtccagaataacgcctcctccagtcccaaccccgtgcagagcacacaaagcagccagcctcagcagtcatcgtcagcacagagtgctgcgatggacatcctcggcggttccttctccacgggcagcagcttgtctgccaagacttacgccagcatctacgtgggctcacaacactccggggaaaaagtgataatccaaattaagtatagccgggacggctctagccttaacaatgggaatatggtgccaaagacagtcgacagctccggttacattaacgtaaagagtgctgattcattcaaatattatcctgactttgctgaaatcaacctgttcgacactaataaaaacctgctggatacccagtcggtgtcgctgtctccagatagcagtacgcagacattctga

SEQ ID NO: 9558 - DNA, 480 bp, synthetic construct
  source 1..480: mol_type = other DNA
gattccgacctggacgacctcaatgacgactctgatctcgacgagttcgatgacgactccgatctcgatgagttcgatgatgactctgatctggaagatgtggacgattcggactttgaggactatgacatggagaactacgacttcaaacataatctacttaaccttaacataacatacaaagcctgcagttcccggctgggcgcgaccagcaacctcaataatcacagcgtcaacgagacgaaaaaagattcaaatcccaacactgaaagcattgaacacgctaagaaggccaagtctgtactgaaatccataaatctgccaagtgaaaaccagagcaattacgacaagaacatcagtgggaacaataatgaaaagagcaacaacgaggagaacaagcagggaaacaactatttaaccatcatctcaattattttggtgttgatcctggtgatcatcgcatgtaagaagctgtactga

SEQ ID NO: 9559 - DNA, 498 bp, synthetic construct
  source 1..498: mol_type = other DNA
atgtcgggcatccccaagaaagagataaagaagcacatccctgtgaaggacctagataaacgcatcaagaagctggagaaggacgtaaaagtgctgaacaggcttcacttcatcaaggcctgctacagcggaatgagtattaaggaggctgcggaactgaatgggatatcctacagcaacgcatacgtgtggttcaaccgatggaacgaagaggggccagagggcatcatcccgaaatacgccggcggacggccatcctacctgacctcagacgagaagattgagctggaaaagctcctccagcaggaggaggtgataacaaccgaaatcgtgcataagattattaaagataatttcggtgtcgattatagccataagcaggtcagaatcattgtcaaaagtttggggtacagctattcaaaaccctatcccatcaacattgaaacggacagccaaaaagttgaaatctttaaaaagaactcccacaatagcatctga

SEQ ID NO: 9560 - DNA, 165 bp, synthetic construct
  source 1..165: mol_type = other DNA
gtgatcattggggaaggccacatattcagcgacaacgacttcaaagaggacctgctaaacgtcggatttaagatcgtgaagtttaacaggggcgaagcaacctacgatttcgcctttatcaagagcgattatttcaattactggcccctgctcaaacgggagtga

SEQ ID NO: 9561 - DNA, 1380 bp, synthetic construct
  source 1..1380: mol_type = other DNA
gtgcagatcattgacaaaatcaaactaaagttgctcaactccagcaattcctacaatttctacaaaaataactatctcgctcagaacatccagttaaagttactcaatgaggagctggaggacaagaatagcgaaattaacaagttcaatgagatcgtgctcgagcagggcaacaacctcaagttgcttaacgaggaactggaggacaagaatagcgaaatcaataaattcaacgagatcgtgctgggccaaggaaacaatctcaagctgctgaacgaggaactcgaggataagaatagtgagatcaacagagtcaattaccggattgataagatgctgtcatttgacttgctgttcaaagaaaacctgacaatgtttaacactcacatcaaagagatcttcgataatcaacgagacttcgcctcgaatctgaatgagtactatgagaaacttagttataggagcaacgaggttaatgaatcattgattaagttcgaaaccatgctctctaaaagcaacaggggaatggacgagaagtctgacgtcattcttgacttcattaaaaatgagaacattcgcataaacaaccatgtggaaatgctgtttaaccaccacgtgaaagaatttaacaaatttaacaagaacataaagaactccatggatttcattgaaaacaattacaagaactgtagaaagtacttcttcaaggggaatgaatccctgctggagccctatctggatacggacttcatgttcaacttttgctacttcaataacatcgagctgctgagctactcaccgaaagagaacctgatactcctaaagaataaggatgggatcgttattgggacaaacaaccacctttggaccattatggagatctacgggttaaatgaatatatgatcccaatcctcttttactttgacgattttgtggtgtttgacatcggaatgaaccgggcctacgcctccttgagttttgccaacatgcagaactgctcttccgtttttggatttgagatcgatgagttcgtatattctaaagcaatagataacatctccctgaaccccaatctggccaacaaaataacaacgtacaacttcggcctgtcggatgaagacggcatcgtcgaactgtattgctacgaaggtttcgacggcctgaataccatgatgtacgacttcctcgaggctaacccttcactgaatctttataaggacaaacttgatgtgaagaaggtgcatgtgaaaaaggcgagtgaggtcatactggacatcattagcaagaataacatcaccagcaatattgtactaaagattgatactgaaggtgcagagtataagattgtctacgacttgatcaagatccgcttcaattga

SEQ ID NO: 9562 - DNA, 1395 bp, synthetic construct
  source 1..1395: mol_type = other DNA
gtggtcccgattaaggagtttacccaacctaaaatctccataatcctgaatctgaacgacgtcacagagaaatacttcgaaaaatgttttgattccatctgcaaccaggaactggattacgttgagatcatctgcgtggaaaacgaaaactataagtttgataaattccagaaatatcttctcgagtacgagtttattaaaatcttcgacgagtactaccttcagaataacttcaacttgatcataaactcggactacattttatttctaaacgcaaaggattggttgctgtttgtgggcctgaagcatgcctacaacctcgccatcgagaatgacatggacattctcataaacagctacaatatattccacgagttttccggcgaaatcgaagacccataccaggaggagtatgcccagctgaacaatctgaacagtttttccggtaacgactttaagaacatcctgttcaacatgcccaagtactctttcaacctttataaaacggactttatcaaaaagctgaacctaaagatccccctggaccttaccagtcagatcagcttctttattaacagctcaatgatgactagccgcattgggtataacaacaaaccattgctgtacaatcggcttaatgaggagaatgataatctcaattactataatctgatttgcaatgacttcaacttcggaatctgtgagaacaatctggagattaacatggacagcattattgacacatatttcaatatcctgtacttcctggagaaggagggcatctacaactgcaataagtactatttgtggaactatattttccgggtcttcagacgcatctatctccagaacttcaagaataatatcgtgattttcaagaatatccatgatttctgtacaaatgtgtttagcaagtaccacaatgacctggtgctcaacttgaaaatagaaaacctcaccttctacaggagtattttaaagtcaaactccatttatgaactggagctgctgtatgaaaataacaggctggtgctgcaaaacgagggaaaagataagatcatcaacgaaaagaacaacttgataagcaatctgaacaacgatctcgctaatagcagcaagaaactcgatgtggaaattaaaaagtatctcaacatactggacgataaggacaatcgaatcaatattctggaggagaagtactcttaccaggtccacgaaaacaatctactaatcgcgaagcttagtgaggtcgaaacctcgcggtcctggagattaacgaagatctttcgtaagatcgggatgttcaaatcaatcatcgtgctggtaactgttgggttcataatctttctcgtaatgtacatacttattatcatgttgatgctcatcattaaatga

SEQ ID NO: 9563 - DNA, 2571 bp, synthetic construct
  source 1..2571: mol_type = other DNA
atgggctttaaggtcagtattataataccagtcttcaatgttgagttctatattgagtcctgcatcctgtcacttcagaatcaaactatcggctttgagaacctcgaaatcatttttatcgacgattgcagcacggataatacttcaataatcatcgagtactacgccaaaaaatacaaaaatattcgcgcaatttattgtaatgagaatagcggagtggccggtaaaccccggaacattgggatggtgaacgccacctcagattatataatgttcattgacccggacgacactttctctaaggatgcctgtgaggttctctatgacaagatcagcaagtcgaaggtggacgtggtgtccgggctccattccaagaagatccacggcgacaccgacatcatttttccaggcctcctgataagtaccttcacaaaccccaatgattcctggcagatcaggaagaagcagctagccgagtacctgaaagattttgatgagctgtacttcgaatcgctcgacgaaatgccctatctcctggggaacttcgccatcatgagcaagatttatcgcaaaagtttcctcttctccaacaatatcaacttccccgaggagatacccggcgaagactccgtatttctgctgaacgtattcctaaatgctaaaggaattatctttattaacaagataatcttctcttattacacttcacgggacgacgaggacaacgcatcgcttacacaccagagtgatttgtccagaaacttggggcgcctgaaggcgtacaagatgatgctgaagctgagcaaggaccacgataagctcgacgagtttgtgaattacctgctgtgcggtaagatgaactacttcttgaatcaatacgtgaataataagaacttatctaaaaaggagatctccataatcattaacgaaagttacgacctatttaccttgatcaacaacagcaattgtaaattcgatagcgattacaaaaagttagttgaactcattattgacaaaaacgtggatgagctgtataagtactcagaaaatgatgtttttcatatcgtgacaaacaaccacgagaccaaatatattaaagacataaaggtagcagtgataatggaccccttcacttacacctcatatagcaatgagttcgaagacattataatcgaaccatcatcgtggttggagacgttcgagaatgaaaaaccagacttattcttctgcgaatccgcttattccggagtgaacaagaagtccgtgatcaacggggtagcaattgaggataatattacgccatggcagggaaaaattgggctgaatctgatcagcggcaacgataatcggaagattctcttcgacatactgaattactgcaataatcataacattcctacaatcttttggaataaggaagaccctacctctttcgacatcaaacagtacaacttcatcgataccagcttgcattttgactacattttcacaaccgatgaagaaaccattccccgatacaatgccagaggacacgacaacgtctacccgcttctgtttgccagccaaattaagctgttcaaccctatcgagtataaaaaacggactaacgacatcatcttcgccggtagttggtataatcagttctccgaacgaagtaacgtgatgagagagttttttaacaaaatcatcaatagtgattacaacctcaagatatacgatcgtgctagcgagatcaactctatcaaccgcaagttccctaaggaatactctcgctatgtgttccccaaggtccactttgataagatgccgagcgtctacaaggagagcaagatatccttgaacatcaacacggtcacaaacagctacacaatgtttgctagacgggtgtttgagctgatgtcatctaatacactggtgctcagcaactatagcaaagggatctttgacctgtttaaggataacgtgatttatctagacaagctctcctctctgaatcttgataagattgatatcgaaaacatttgtgagaacaacctgtacgatgtgctcgagaatcacacttactataacaggttcaagtatatcctgaatattatcggattcaagttcaaggaggagaataataacctgatcatcatctacggcttgaataataaaaacgagctggagattatcttgaacgacttcgagagcatcaagtacgttaacaaaacgtgccttatctatgtcaaagataataatctcctgaacagcctgaacgagaggttcatcgaagacgttaagtttattggtatcaaagagcttatcatgatcagcgaagaatttaaccagagttactttttcatcatcagggacctgtttcacccacttgaaaaggacttcattagaagggcttttctgcattacaactatctggacaagaacatcggcgtcaagcagggcaaccctaaatacaacctggcgaaaaccatagaatacaaaaatatccttttcaacattgagctgcttgacaaagtcctcgagggcttattaaaatatcgactgaacaagctaaccatcctcaacatctga

SEQ ID NO: 9564 - DNA, 1236 bp, synthetic construct
  source 1..1236: mol_type = other DNA
atgaagatatgcattttgggtcagggatacattgggctcccaactgccgcactcttcagtctcaaccactgcgaggtgattggagtggacatctttgaggatatgataaataatttgaacaaggggattatccatatagaggagcccggaatttccaagatcatcaaaaaggcgatcgagtcaaacgtgtacagagctagcctcatcccggaaaaagccgacgcttttataatcacggtccccacaccgtatatcgtggaaaactatagctgtgacttaagttacgttacaactgcctgtaagagcatccttccgtacattgagaagggcaacacagtaatcatcgaatccactattgctcctatgagcacggatgatgtgattaagcccatatttgagaacgccggctttataatcggcgaggacctgttcctggcacactgccctgagcgcgtcatccccggcaagatcattgacgaactgattcacaacgaccggatcatcgggggagtcacccccaagtgtgccgtaaaagctagcgaagtgtacgatcagtttgtggagggagagctaatcctgaccgaggccaaaaccgccgaattatctaagtgcatggagaacacattcagggatgtgaatattgcactggcaaacgagctgacgaagatctgtaccgaaatcggtgttaatgtactcgacgtgatcgaaatggccaataaacacccaagggtgaatctgcactcacctggtccaggggtgggcgggcattgcctcgccatcgacccttacttcatttatgctaaagcccccaagaccgcccacattatcaagctggcacgggacacaaacaaatccatgccagatttcgtctgtgagaacgttgagaaaattatctcgaagggcaaaatcgctattttgggcgtgagctacaaaggcaacattggggacgatcgagagagcccctcctacgaaatcatcgcgaagctgtgctcaaagtatgaaatttctatacatgaccctcacatcgacaatcccaatttcgtcagtctgggcaccgccgtgaatggtgcggatctgattctggtcctttgcgatcataacgaatttaagaacatggattatgatctgatcaaagacaaaatggaaaaggcaatcatcttcgacaccaagaacataataaaagaggttccagacgacatcaagctattcaactatggaaatctttactccatttga

SEQ ID NO: 9565 - DNA, 438 bp, synthetic construct
  source 1..438: mol_type = other DNA
atggataaaaagtggatcgtccttacgatcttcctggtaattttcggctttctaatcctgaacggactgaataatagtatacatgtgggggactcctactttagcctccccgaagggtacgtggagggcaatattgtgaaatacaacgatgtgaacataaccaatggcactacctcattgcggatcatagagtacaacgataacaatatccaggagcacatcgacaagtacgtgaactatagcactaaccacaactattccacaaaaattaataacttcaatgttgatggtatgaacgtttataagtctgaaatcatccagaacaacaagacattccactattggttcatcaagaaggacaaagtctacgagattgtcacctgggacggaaattcgtacaccgacaatacagtgtttaacctcattaagagcaactga

SEQ ID NO: 9566 - DNA, 867 bp, synthetic construct
  source 1..867: mol_type = other DNA
atgaaaaatctcattaagatcaacgtcgattttgaggagctggacaattacaagttcataatggacgaacccttttccctagaggtgaattataaccatgtgaagtacaactttatcatcaaattcagcagcaataataacaacctgatctgctgtgcgcccggagcccaagaccgcaacaagcgaaccagtcagggggaattgatcaagcccccgtatttcgaccggtggagctggttcaagtactttgaggaaagtttcattgctttcagcgaccccattttctattacgataaagagatcacactgggctggtgcgtgggcgataaaaaccagtggtatgccgaaaacatatccctgatcatccagaaactggcaaaaaaccaggaaatcattaatgagaatatcctatttttcgcatccagcggcgggggattcgtatcgataattctggctactctcatcaaaggttccaaatgtgtggttaacaactctcaatttagcatatttaatttttacgaaacccacatcaaccggctttttaagtttctcgaaaattcattcagactcaataagagcgagatcacggacaagatcgattacaggctggatctgataaagcttttcaagaaagagaactatatgcctagcatcacatactacgtgaacgcctgctcaaagtacgacattaagtatcacgccatgccattcatcgagaacgtcatgttcatcccacagttcaaagataacttaaatgtccattattaccacgagtacaaagactttcctcacaacccaatgagtaccgacaagattctggtgattctcaagaacttcattaagattaatttgtacaacaatttctga

SEQ ID NO: 9567 - DNA, 534 bp, synthetic construct
  source 1..534: mol_type = other DNA
atgccaacgtggcggctgcagctcgaaagtgaagacctgttcctaaacagcaagtactacgaaaccctgaataacttcctaaacaataaagaactcctcgagctgctgaacaagaacgactataaactggtattcaagccgcacgccgagttaatggaatacctcgatcttcttaatgtggacaacgacgtgtacattagcattaatgaatcctatcaggatctgttcaatgagtcggcaatactgatcaccgattacagctcagtgttcttcgactttgcgtacctcaaaaagcccgtcatttattaccaggacaataacgattaccattatgatgagggctacttcgattatgaaacaatgggatttggggaggtcatctccgacgagaacctgttgatcgagaagatcaagttttacctggagaacaactgccaaatggagtacaagtataagtgcaacgtggagaacttctttaaatttaacgacaaaaagaactgtgagagggtttataattggatcttgaataattga

SEQ ID NO: 9568 - DNA, 1926 bp, synthetic construct
  source 1..1926: mol_type = other DNA
atgaagtataatttcaaattttctatcatcattgcagtgtacaacgcggaaaagtacttgaacgaggctatcgattcaattatcgatcaatcctttgattttgaaaagaacacgcagttgatccttgttgacgacggtagttcagataattcactcgaaatcgctttgcagtaccagaaagacttccctgacaatatcctcgtcctctccaaagagaatgggggccaagccagtgcacgtaacctgggactgaaatatgccactgggaaatacgtgaactttctggatagcgatgactacctgtctaacaatactctggaagaggtgtacaatttcttcgagaaccatttcgatgagattgacatacttgcaatacccatgattctctttgagagagtgaacaagccccacagattaaattataaatttaatgagaacaagatcatcgacctcattgaggacccaaataacccgctcttgtcctcaagctctagcttcattaagagcgacgccatccgagattacaaatttgacattaaccttgtcaatctggaagacgctctggtaatcaataagatattgctggacaagaagaagtacgctatcctgaatacatgtaaatattactataggcagaggaacttacgaaactcgaccgtggacacaatcaatagtaaaaaagagtattttaccgaccgcctgaaaagcttttactgcaacataatcgactactgcttgtctaaggagggcaacatccccaaattcatccagtatctgatggcctatgacctccagtggctgctcaagctacccaacctcgatgtgctggagacggagattgaggtgcaggaattttgggattgcctgtattacgtgttaggatttatcagtaccaacgttgtctatggaaacaagaatattcttaacgatgtgaagcccttctttctgtacctgcttggcgaagaaaaatacatctcgctggatgacgacgggtcagtgctgctaaatgtgggcacacacaacgttgacaagctcagccgccacaagatctggctggacataatcgatataaagaaggatatactcaatatcagcgggatcttcctgactaatttccctaaccagaacatctcgatcaaagtcattaaggagagtgagaagcatgacaaggaatacttctgccagtataaaaagtacaacagcttcgagcggaaaaacaggacatttctgggattcgactggatcttcccatacaatttcgatgtcaagatcccactggtgaagaatgaatccagcaagctaagatttgtggtcaactaccaggatgatgaacacttatttagcttcgaatccagcctgggtctgaactatggcgtacggctgtccgacttcagtgcctgtattagcaaaaagcactatatcgtgcttttcaaatactctaaacttttcattctcccttataagtattctagcatgctgcggtacgagttctccaacattaaaaagaccatcaaggataagccaaatttcttcttgagtagcattttcataagactggcatactacatcttgtaccctctgttctccaacaagaagatttggatcttttccgaccgccccgacttcgccgatgataacgcgaaacacctttttaagtatgccattaaccaggacgacgacgttaaaaagttctttgtactgaataaggacagtaattcatttaacgacatgaagaatgagaataagaacgtcatctctttttccagcctcaagcatcggttcctgtacctatatgcggagaaaattatttcatcctacgtgaatgaggactttataaacccgttcttcaactacaacaaagatctctttgatggcctcattacctcgcaacgcgtcttcttcaccgcctggtccaaccagaggtga

SEQ ID NO: 9569 - DNA, 807 bp, synthetic construct
  source 1..807: mol_type = other DNA
gtggaactcgtcaagaaactggacgacgtgaagaacttaactaacaacaagctgattggtgctcccgatttgataaatagcgagatccagttccacgggaggaataacatcctggtatgtgagggcacgatcaacctggtgaacagcaatatcgtgttccagggaaataacagcatcatttacctttcctacacgaaacacgattacaagctgatggtctttgttcgcagtgacagcaccatcttcctgggaaaaaataacgagatcggctctaagttcaatattaacatccaagaacaccagaacctgattattggtgatgactgcattatagggaacgatgtaactatccgaacctgcgatacacgggccatttatgattttaacaccaagaaaagaattaatttttcagagagtatcttcataggcgaccatgtctggatagatcacttctcgtatatctctcggggggtgcacgtgggcagcggagccatcgtggcggtgcatagttttctgagcccgtactgcaaggtgcattcaaacaactacgttatggggaacccaatcaaggtgttcaatgacaatgttttcttcacaaaggagttcaccggcagctataacgtcgaggatacaatgaatttctcctcctacaagtccgacatcttccactacgactttgtgcttaatgaaaccttggcaatggacaatatagacaaaattctaaaggacctcactgtcgacgagaggctcgattttctcgaaaaactgtttatcaagaacaaaagaaaaaaccgcttttattattga

SEQ ID NO: 9570 - DNA, 1068 bp, synthetic construct
  source 1..1068: mol_type = other DNA
atgggagtcaatatggtgagcgaatttacagtctttgggtcatgtacttgcagagacatcttcaacagtacgattaataagaactataaagattatttccatatcaatcccagcgggattagggtatcctacattagtctgatgcacccaccggtggactacacagaggagtccttgatcatacaccccgagacaaagaaaaacatcaacttcagcaattggattaagcaggatctcgacaaaagcttcctgaacgagcttaagaaaaacaaaagcgagtaccttatcatagacacgtattacgacgtgaacttcggcatcattgaatttgaaaataaaaactacattaccaacaatctgcatattgataagacggaattttacaagaacctaaactataaaaaggtcatgacaattcagtctaacaaaaatgagtatctgaagctgtggaaggaaaattgcaatctattcttcaactttctggagaagtactgccctgataccaagatcatattaaatcccacccgccacgtgactaatctgatccgcgccgacggaacaatctctgaaatgggcatatacaagaagatcagtgagaagtataacccatatcgggacctgctcgacagccatattattgagaacttcaatgttgacgtgctctacttcgatgagaacacccttgcatccgagaacagcatttggggcgcttcatccctccactataatacctcatacttcatggatgttacaaaacagttgaacgagtttatcaaaaggaacaaaatactggataatgccaatgagaagcgattaaataacctgttcaagaaacaaaaccggaacttgctcacttttaaaatccagctgaacaacaatgagaagatcaacaaaatcgtgcacaagttcaagcagaacaatacctacaagaaccttctgaagaataataacgaaatcaccaataacatcaccgaactgaaggacatcctgacttcgaatgaatacgcgtttctcaactctataaacaactccaaactgtcgcagatcaagcaactcaagttgaaatga

SEQ ID NO: 9571 - DNA, 771 bp, synthetic construct
  source 1..771: mol_type = other DNA
atgtcgctgatcaaggagaatgaaatttttttgttcgaagagattgtgaaaaaaaactttgcctcaaagtacaagggttccgtactgggcatcctgtggagtgtcctgaaaccactcctcatcatgattctgttaacaataatcttttccactctattcgggggcagcattaagaattaccctgtttacttcttgtctgccaagtgcatttttgatttcttcacggctgggacgaacagtgccatgaatgcgatcaaaggaaacaagaacatcttgaagcgcactgctgcccctaagcacgctttcgtcctcggcagcattatcgcagagtttatcaacttccttatcactctggttattctcgtggcggtcatgattgtaacaaaagcaccctttaacatcaatacaatccccttcaccatactaccgattataagccttctcatgatgatcaccggcattgggttcatactgtccatcctctgtgtgtactataccgacatccagcacctgtggagtgtggtgacactgatggccatgtacgcatctgccatattttatccaatggacatcatcccagaaccctaccaccagtatatgattctgaaccctatcttctggattattgaccagtttaggcatatgaccctctggcaaagcatgcccagcaccctgaacctgatcaattcattagtgctgtccaccataatccttgtgattggaatcatcgtctatatcgtgtacgagaaaaaggtggccatgcggttctga

SEQ ID NO: 9572 - DNA, 1110 bp, synthetic construct
  source 1..1110: mol_type = other DNA
atgaataagcgggacaaaataaagacaaatctgatcaaaaagtacaacatctcccccgaagagtcagagatcctcctgaccaagattgagaagcgaattgcgaaggagaatgctaggaaacgggaaattctctctaaaaacatgttcaacgagagcaaggaagaatttaaccagccggagcataagataaggaatatcaattcagaaacgaacaagtataatgacttcgagaccatcacccaaaacatttcaagcaaggaaagtgagaagctcaagaaagaggagaacaataatgttgacacaatcctctccaacattattcccaactatgatcaggagatctccatcgagctgaataatgtcgacctaatctttgaggtggagacagacaaaattgacaacataaaagagaacatcatccgtactttgaagaggaacaagtctaaaaaaaccaagtttcaagctctgaacaacatctccttcaagatcaacaagggagagaaagtgggaatcatcggatacaacggcgcggggaaaagcactctgctgaacgtgattaccggcatttaccctataaacaatgggactgtgaccacccacggcaagataagcccactgctttcattgggcgctggttttgaccataattactctggccgcaaaaatatctacttaaacggcgcagtgctggggtacagtaaaaagttcctggaggaaaaggaagaggagatcattgagtttagcgaactgggagagtttatcgacttccctattaaaaactattcctcgggtatgctcgccaaactagggttctcgatcgcaacaattgttgaaccagatatcctcataatcgatgagatcctgggagtaggcgatgtcaatttccagagaaagagtagcgacaaaattaagagcttgatggatggtgggacgacggtgcttctggtgagccactccatcccccagatcagagaaatctgcgacaaggccatttggattgacaaggggaaagtccgcgaaataggcgaagtaaataaggtctgtgatcactatcttaaggatgccgaaaaggccagtaacaagcagttagccaacattaaattccggtga

SEQ ID NO: 9573 - DNA, 1194 bp, synthetic construct
  source 1..1194: mol_type = other DNA
atggacctgatagtagcaaagtttgggggcaccagcgtggggaacggtaaaaggattagaaaggccgccgagtccgtggcaagggagtacaaaaagggcagcgaaatagttgtggtcgtctcggccgtcaataagaccactgacgatcttataaacataacaaacgatgccatcacatgcaatctgacagaaaaacagcacgctgaaattgtgggtatgggggagcgcactagcgtgcggctattctcagctacgcttgaaagcttgggcatcaaatccttgttcatcgatccttactctgaactctggcccattattacggattccaattatatggaggcccgaatcgatcttgataaaaccaaggagaaggtgaacaacctcaaaagtctcctggaccagggaatcgtgccggtggtctgtggcttcctgggcaagtgcaagaatcaggttaccacactgggccgcgggggaagtgacatcaccgccttcctgatcggggaatgcctgaatgcaaccgaagtgatcatcgtaactgacgtcgacggagtcctatcaactgacccacaaaagattagtgaggccgagctcttagaaagcatcacagttgacgagatgaaaacactggcaacccacggtgcccaggtcctccacccccacgccctggattacaaacaccccaagatcgatgctaaaatcatcaactacaacaaggaggacctgaaagcggaaggaacctacattaccgggccaaaggattacaagccaatcgacttgtatgagaaccctgtggcgtcaataacgatcgtcggcaaaagcttgctcaacaaggtgggaatcgtatcggcactgtcaaatattctcctcgaaaacggcatcaatctgtttaagatgaatcctcatcacaacagcataaccgtgttcattgactccgaagacgcggataaagcttacgagctataccatgatcatgtggttaaaagcgaggaccttagttccatttcccgggacaaggacactgccatgtttagcattacaagccccgagatcagcgagattacactggctaatctgctgaccgagaatgacatcgatgctgtgttaatcaactatacgaagaccgaaattctgctttttgtggagtgggagttcaagtatgaggtttccaagctgctcaacacttataagaactga

SEQ ID NO: 9574 - DNA, 783 bp, synthetic construct
  source 1..783: mol_type = other DNA
atggagaacatgataaatagtctaaaaaagttgggactgaaccggtacgaggcactcgcttacatcggccttaacaagataaagaccggacaggccgacgaaatttcggaagtgtccaagctgcctcgctctcgaatatatgatgtgcttaaggagttgaataggaagggcttcgttgagattgaggggggaaagccactgaagtataagatcatccctccgagcaagatctttaaagaagaaaagaacaagctaatcgaggagctggagaatactgaaaagaagctcgaaaagctttacaacgacgagttggatgaaatccaggctccaatatggctgatccattccagtgagaacattatcgaaaaagaagtcggcatcatcagaaaagcgcgtaagacgatcacatgcagcatcggcttcctcctggagggggaaggtaaagcaatgattaaggcctttaacgaaatcccacgcaacgtggagatcaagattctggccaatcagttctgttatgtgaataaccacaagatagacatcatcaaaatttttaaagacaccaaattagacaatctggagattatcccctcagatctgcccatgatgaaactcctgattgtcgacgagaaagagctcatcagaacattcacccggttcaccggtgaaaacaacgagatactgccccagactgccattggggtacacaatacatacgaggacatttgcaaaaatttcagcaggcacattctcaaagagtttgataagaaccggcaagagaactga

SEQ ID NO: 9575 - DNA, 420 bp, synthetic construct
  source 1..420: mol_type = other DNA
atggctaacttcaatagcctcaaggaagcacgagagtttttctacaaggacaagtttgccataaatacaggagttacactggacgagttaaccgaagacaaggcaatttgctctcttatgctgaacgacgagcataggaatgcgtacggcggggtaatgggaggcgtcatcttcacgttggccgatttcgccttcgccgtgctcagtaaccaaatccaccagctcactgtcgcgcagcaggtgagcattaactatctatccgcccccaagggcgacatgctgatcgccgaggcagcttgccggaaaagcggccgcacctcatccattgtgatagtggatatctcggacgacctgggttgtgatgtggctcagtttgtcgggaccgggtttaaactgaaaaacagcaaaatcagagattga

SEQ ID NO: 9576 - DNA, 477 bp, synthetic construct
  source 1..477: mol_type = other DNA
atgtccgagttgacatttaagatcgccgaaagaaaggattcccgactcatcctggaatacatcaagaagctggccgattatgaaaagagatcggacgaggtgattgcaaccgaaaagagtattgagaaatggatattcgacgagaagcaggccgaggtcctatttgctctggaggataggcacatcgtcgggtttgctctttatttcctgagcttttcaacctatattgggaatgtgaacatgcatctggaggatttattcatcgaccccgaataccggcgccgcggatacggtaaagcattgctgaaagagctgggcaagatagtgatcgacagggactacggccgtttcgagtggacttgcctttcttggaaccggccaagcattgatttttacctcagcatcggcgccgaacagaaagattgggacgtattccacttcacgggagacgcgctcaaggacttcgttaaagagtga

SEQ ID NO: 9577 - DNA, 735 bp, synthetic construct
  source 1..735: mol_type = other DNA
ttgtatctgcttagcaatatcgacgccgttgactggtcaattgatgacgggtatgacgccgtggacgtctgcccgttctgtgaaatgcccgtgccagattatgtcaggagctgtgtggtgtgtggcctgagtatacgcgacatcgacttcgaagagaatagcattaataagtacacggacttccgagaaagctttgacaagctgtttgatgatatggactctaaacttggaaatatgattttcattaaggacgatgatgagctattcgagttcaaaacattctataacagtttcatgctgaactacgattaccacgagttcttagaattttacaatcgggcggataagaaccttgaaatgcagcaaatcgccgagttgttcatcaatgacaaactcaacaagtccctgggcaccgagtcggaatttgacgactacgccaagtatctgatatactactgcaactattacatcgctaatgacgacctggatgatgctttcatatactatgcacagatgctcctgctcatgtccaattattctggagacaacaacggcgagctcttgatcagtgtatacctgtttgatagcttttcatgctacaactgcctctacgggtcccagcatagctttgacatctccaaactattcgatgaagcaatcaacacctttagaatcgaggagtacaacaagaaccacaagttcattctggagaaactggaggccatgtttggttga

SEQ ID NO: 9578 - DNA, 450 bp, synthetic construct
  source 1..450: mol_type = other DNA
ttgaagaatgactatgcaatcaagctgacgtccaacttcatcctcagctacctcaagttcattgtggatactgatgagatctacaagaacccgaaaatcaaaaagttctacaagaaatcagagcacaccatcccctataaggctaatctgtttgacatggacctgtgtggcgtcatgtttcgagaccctgcgggaaacttcattaagtacactgattttttcgccgtaacaattccaagaaagtacgacctgaaaaaatacaagtgccggaagaaactaaagaaagtgaccgagagctaccttgacgacaaatattccgtctggacagatagcgtggatataatcaacgaatttgtggacctgaaggatcgcgagttcgacgaaatgctcaatattgaaaacatgatcgggatgcggaggagttatgccaggaccttactgatagtttga

SEQ ID NO: 9579 - DNA, 336 bp, synthetic construct
  source 1..336: mol_type = other DNA
atggatgaagggctgtttcaggacaagaatttgaaagacaagctgttcaacgaatatcctcatatcttaaaagccatcgagaaggaaggctatatactcgattacctctccttcgatgtctttaccgagatccgatttgaggacgatgtggtgggattcattagctttagcagattcgacattgtagagaattacttcgccattgacgaggcatatatcatacccgaataccggggcaacaacctcctgttcgagcacctgaacaatctgttccttctagacaacttcaggtactttccacgcaagccgacaaaagcttttatcaacgtgtgctga

SEQ ID NO: 9580 - DNA, 1335 bp, synthetic construct
  source 1..1335: mol_type = other DNA
ttgtcatacgtggacgaggtgattgaaaccattattgagcagaaccctggcgaggcagaatttcatcaggccctgcgcgaagtcatggagtctataagggtcgtggtggaagaaaacgaggaagagtacaagaagaatgcccttcttgagagactggctaatcccgaaaggcagatcaagttccgggtgccctgggttgatgacaacggtcaggtgcaggtcaatacaggataccgggtacagttcaacagtgccatcggaccatacaagggaggactgcgtttccactcctcggtcaacataggtattatcaagttcctggggtttgagcagatcttcaaaaacagcctaaccgggcttcctatcgggggaggtaagggcggctctaactttgatcctaagggcaaaagcgacagggaggtcatggcattttgccaaagtttcatgactgagctctacagacacattggcgctgacactgacgtgcccgcgggcgatatcggggtgggcgctcgggaagttgggttcctattcggccaatacaagagactcagcaacctctatgagggagtactgacagggaagggcctgaccttcggcggcagcctcacacgaacagaggccaccggttacggactgttgtactttacgaacgcaatgctgaaggccaatgatatcgacattgccggtaaaaccatcgccgtgagcggggctggaaatgtcgccatctatgccatagaaaaagcccaacagctgggcggcaagccagtgacatgctctgactcaactgggtggatttacgactcagaaggcatcgatgtggaattgctcaaagagataaaggaggtcaaacgagagcggctgactgcatatgcgaaagcccgcgaaagtgccgagtatcacgaaggtaaaggggtttggacggtgaagtgtgacatcgccttgccatgcgccacccagaacgagctgcagctggaagacgcgaaaagcctggtggagaatggggtgcttgcagtggctgagggggcgaacatgcccaccacgattgaggcgaccgagtacctccaagagaatgatgtcctgttcgccccgggaaaagcctccaacgcgggcggcgtcgccacatccgctttagaaatggcccagaactcccagcgcttatcctggacctttgaggaggttgatgccaagctccagaatattatggagaacatctttgcaaatgccgctgctgctgctgaagaatatgggctggacaaaaactatgtggctggcgcaaacatcgcaggattcaagaaggtagttgaggcaatgaatgcacagggaatcgtgtga

SEQ ID NO: 9581 - DNA, 252 bp, synthetic construct
  source 1..252: mol_type = other DNA
atgagtgtggaaaagcttacgaaatcccagtacaatgatctgaagaatagctatctgaccaagaaccgcaccatgcatagcctctacgccgagatcaacaaggagaacaaggtcgacaaacacctatttttcaaactgataaataaaatccggcaggaggaaggcctcaacgacttctacacaatgaaaaaggaaaaaaagaggaataacattatcgagaacttggacaagtcacccaagtactataactga

SEQ ID NO: 9582 - DNA, 1245 bp, synthetic construct
  source 1..1245: mol_type = other DNA
atggccgaagtaagcagcaaggagctgtatgagtttaaaaagacgctgaaggaactaagcggaaagcgaggccgagggacagagctcgtttccgtgtacattcctcacgataagcaactgagcgacgtgggtaagcacatgcgggacgaactcggacaaagcgccaacatcaagagtaaacagacacgcaagaacgtccaatccgcaatcgaggtgattttacagagcatacgcctgtataaacagcccccagagaacggcctggtgctgtttgtgggcatgatccctaagggagggcccggcactgaaaagatggaaaaatatattctcgaaccccctgaaccaatcaccacctactggtacaaatgcaataacgaatttttcatcgaaccgctggaggagatcatcgaagagcgtgacacctacggccttgcggtagtggacagaaaagaggccactgtcgctacgctgaagggtaagaaggtcaatattctaacccacctgacaagtggtgtgcccggtaagcacaaagcaggcgggcagagccaaaggaggttcgaccgggtcattgacctcgcggctcacgagttcaagaaacgcatcggggaacatatgaatgatgacttcttggagctcaaggacgatctcaaaggaatcatcgtgggcggaccagggttcaccaaagaggaatttatccagggggactatcttcagtatgagcttaaggacaaaataatagcaaccgttgatacatcatacaccggagagccgggcattcgggaagtcatcgacaaatctgcagacatcttggacaacctggacgtgatgcatgagaagaagcaggttcagagattcctgaaggagctcactaaggataaaggcctgtgctcttacggggaaaaccaggttagaaacaatttgattatgggtgccgtcgacaccctgctgctgagtgaggatctctcatccatgcggaagacattcgagtgcaccaactgcggaactcagattgaggtcacagtgaaaactcaggctgaggcggataaattcaatgaaaggtgtcccaactgtaacgatacgtttaaggaagtggcctcgaaggatttgacggatgagtttgtggagaaagccgaggagatgaatacaaatgtagagtttatatccaccgagaccgaagagggcatgcagcttttccgcgccttcggcgggatcgccgctattttaaggtactacgtggaatactga

SEQ ID NO: 9583 - DNA, 1068 bp, synthetic construct
  source 1..1068: mol_type = other DNA
ttgaaagcggcaaagaacatcaagatcattaagcgaaacaaaaacgtgatgaagtggaagattgggaatgtcaaaattagcaatcagatagtcttagcacccatggctgggatatgtgactatgccttccgcagcataatcaagtccatggggtgcggtctgattgagacagagatggtgtcagacaaagccataatgtacaacaactttaaaacacaagagatgctcttcatgaaggacgaagaaaggccgatctcgcagcagatcttcggttgcggcaccgacagcttcaaaattgcttccaaatacatctatgaaaatatgaaacctgacattatcgacatcaacatgggatgtcccgtgaagaaagtagccattaagtcaaaagctggcagtgcccttttgaagaatcctgagaaagcccggagcattgtggagaccgtggtggacagtgtgccaattccggtcaccgttaaaattcgcagcgggtgggataagagcagcatcaatgctgttgagatggcgcagatcatcgaagaggccggggcttccgcaattactgtccacccccgaacaagacaccaacggtacgacattcctgcagactggagtataatcaaggatgtgaagaaccacgtgtccataccagttatcggcaacggagatattaagtcatgctatgatgccaagagaatgctggatgagactggctgtgatgcaattatgatcggcagggccacgctgggaaatccctggctggtaaaacagtgcatcgactacatcgactatggcatggagcccgaaaaaatcagcgtggaagaaaagatcaacatggccaagaggcatgctgatatcatcgagaagacccaagcggagaagctagcaatctcccgcatgagaacccagacggcctactacatgaagggaatgtacaacactgccgacatcaagccaaagctgtttaagatgaatagcaaagaggaaatattcagtctgctggatgagtatctcgcctcgcataagcagcaccttcgggaatttgtcaaacagaaccagatcctctcctga

SEQ ID NO: 9584 - DNA, 969 bp, synthetic construct
  source 1..969: mol_type = other DNA
atgatcgagaaaatagagatcacgcagagatttaacttcaagcggctgaatcgccactacgaatgcttcacaatcgacttcagcaataattcggcctactataagatcagcgagaggggcagcggtgataagtttctgagcgaaagtgatctgtgcgacgattcctggattgaaatcctcagcgggctgcgcaggaacatgacaagtgagatctgccacttcaacctgaagcaagctgacaagttcctgaacgactttaacaagctaaatctttttaaggacttccgatccgaaaatttttcttactttgaaaaaatagagttgatctattcttgcaatattatcatctactcaaccgataactacgaggagtatgcgttcaagaacaacttcccgataaattggattaagtttggtgaaatcctcaaagagctactgaacttcgacgtgctccaccttgactaccagaaacagatggtcaccccattattctacgacgtgtgtctggacggcgtttactacgatggggagctcttgaagctgaaagccattgagtttggccattacaggacctacccctatgatattccaaaacccagattaatcatcgacttcaataaaaagcggatcgacggctatattgacaaaaatctctccagcggcgatgagaacgcaattctgagtctgcttgaaaagtaccatgtgtataactggattttcgatgaatatcacaacaagtccaatactcgggaccctgatgatctggaaggatacgactggtacctggagatggtgtttgaagaggggatcatttggcacctgttcggatacaacgactatcccgatacctatgtctgtctcgcccgtgaggtggagaagctcactgggatggatcttttggaaataaacacaatctcaggagaggacttggtactgtttgacaaattctctaagatgctgctcatgtga

SEQ ID NO: 9585 - DNA, 519 bp, synthetic construct
  source 1..519: mol_type = other DNA
atggtatttcgacggtgcccccagtgtgggagcacaagtgatgatcagtatggattctgtatcaaatgcgggtgggagttcgcaaagatagacgccacaaagaacctctgtcctctatgcggacacgaaaatcccaacgaggccgacttctgcgttaagtgcggtgcgccactcgtgtttaagaaccacccgaatgaagagcagaggaatataaccccaatcgtcatcaacaaggaggtggctggcacgcctattcaaaagaacagcggcggctggatcaaatggattataatcctggggtacatcttctccatcctgggcggtctgcttggattgatcattgctgtgtacttagtgactcgcaaagaagcgactgtgagaaaacatgggatcatccagctcgccatctttgccttctacatcgtcctgattgccgccctgtacgccaccggaatgattcccgcagacgcaattaccaactatcagcaactgattgctggcaatatgacccttccatga

SEQ ID NO: 9586 - DNA, 456 bp, synthetic construct
  source 1..456: mol_type = other DNA
atgattattcgaaagttcaacccaaatgacctcaagagagtgtttgaaatagagaacatgagctttgaccagtcgtacggcataaaaatgttccagcagctgtatgaaatgggcatcggattcttggtcgccgaacacgaaggtcacgtgattggctatgtgatgttctggattaaatacgagttcaatggacacatcatctcaatagctgtggacgagaactacaggcgcctgggggccggaacaaagctgctcgtgaaagcaatctccatcctaagcatgcttaatatcgacaacatttacctggaggtaaatgagcataatgatggcgcgattgagttttacaggcggtttaacttccaaatcgatcggaccgttcccaactattacgcaagtggggatggtgccgtcatcatgtatctgccgctccgcaaggggcatatctccagcaactga

SEQ ID NO: 9587 - DNA, 390 bp, synthetic construct
  source 1..390: mol_type = other DNA
atgtggcaagacttcggcgattacatcctgagcgaggccggagacgatcccgtcaagatcgcagagatcggggtgggtaagttcgacaaaatttcagagatactgtccgaaaagaagaacattaccgtgctgaagacagatattcacccaaaagatagcaccgtgataaaggacgacgtaacaaatcccaacttggaattatacaaagacgtcgacattatctactcgatccgcccgccaagtgagcttcagcctcatctaatcaatctcgctgagaagataaactcccagctgattatcaaacccctgacgaacgaagatctgaatactggcagggttaagatgaaactcaaaaactataagaaggccagcttttatatcctccggtga

SEQ ID NO: 9588 - DNA, 2430 bp, synthetic construct
  source 1..2430: mol_type = other DNA
atggagaagctgctaaagaaatataataccacacctgatggcctgagcgagtccgaagtgctaaagaggcatgaacggtacgggcttaacgagctggatgagaaaaagccaaccccaccaatcatactgttcctgtcccagtttgccgatattctcatcgctcttctgatcattgccgccatcgcctcttttgcgattggtgacaccatagacgccggcgtgattctcctggccgtgctcttaaatgtaatcatcggattcattcaggagtatcggagcatacgcgccgtcaatagcctgaaagacttgatggtcaagaaggccatcgtgaaaaggaataatgaggtcctggaagtggacgctcggttcttgaccattggtgacattgtaatccttgaggaggggaataagtcccccgccgatctgatcctcatcgaaagcaatgacataaactgtgacgaatccttcctcacgggtgaatctgaagcggtgataaaggaagagaaggacgctgtgttcatggactccaacatcattagcggccacgggctgggcattgtgaccgacatcggaatggacacggagatcgggaagatcgcagagattgtgcacgaagaagatgagaagacacccctggcagtgaaggtgggcaaacttggcaaaatcctttcagccattgcgatcttggtgtgtaccgtgatctttatcctggagcttatccagggagccggtattgtggagacgttcatgactgctgtgagcctagcagttgcagccattcccgagggtctgcctgcggttctgacgctgacactggcgctgggcatgtctgagatggcatcaagcgacgctctggtcaagcgcttgttgtctgtggaaacattaggctcatgtaccatcatctgcagtgacaagaccggcacactgactgataataagatgtcggtggtggagtcctacctgctgaacaaagacaagctcttgcttatttcaaagctgtgcaacaacgcgatcattaaggacaatgccctgatcggaaatcagactgacggcgctatcctcagatttgcccaaaactacgagacttccctggagcgcatcgatgaaatccccctggacagcaaccggaaaatgatgaccacaatacacaggctggacagtgaaaataagattgttttgagcaaaggggcgcccgagatcattctaaataactgcaagtatatagataacaacggaagtatcgagattctcgacgaagagatcaaggagactgtagtcaaaagaattgatgagatgagtgacgaagcactcagagtcatcggctttgcatacaagatcaacgatgatgaacgacccgaggaaaacctcatttttacagggctgcttgggctcattgatcccccaaagaagaacgccaaaaaggcagtgaaggaatgcatcaacgctgggatcaaagtccgcatgattaccggagaccatgagaaaacggcaagtgcaatagcaaagcagctcgggatacttactgacggccgggtcattaccggcaaagaattagaaaaaatctccgatgaggagtatctggccatcgccgacgatatccaggtttacgccagggtcaagcctgctcagaagatgaggatcgttgaagctctgaaagatctgggaaacatagttgccatgaccggagacggaattaacgatgcccctgctctgaagaaagcgtcaatcggtattgccatgggcgatgggactgatgtgtctaaagagagctcggacatgattctgcaggacaatgatttcagcacgatcgtaaaggccatcaaagaagggcgtaagatttacgacaacattaagagattcgtcaagttccaagtatccacaaacgtgggggctattctcacgatcgtcggaacaagcctactcaacctgcctctgccattcaatcccgcccagctcttgtggttgaacatcgtgatggacggcccgccggcccaaacacttgggatggagggtgctgaaaaagataccatggcccgaccccctgagaccggcgacatcttaaccaagaagacactgactgagatatttctactgggcctggtgatggctaccggcaccatcctcgtcttcagctgggagatctatagtggtgccccaactgagaaggctatgagtgttgccttcaccctgttcgtcgtgtaccagctgtttaatgcctttaacggacgctccaactcgactaaaagcagcaaatatttatacattggacttgccttgtccttcatgctccaattgctcataatatacatcccgcagctccagatcatttttcgaacaactgcaatcggcattgcagagtggaccatcataatcattgttgcatcaacaataatcgctgctcagaaaatcatgaataaagtgatcaagtga

SEQ ID NO: 9589 - DNA, 786 bp, synthetic construct
  source 1..786: mol_type = other DNA
atgaagatcttcctgctgggcggtacgaaagactcaatcaacatcatcaagttcatcaagaagaattacgacgcatacattctcacaaccactacgaccgagtacggcgctaaactcgccaaggagggcggaagcgacgatacaatagcccgaccgcttccaaaagaagagattattgacatgataatcagtaagaactatgacatcttaatcgatgcaacccaccctttcgccgagcacatcacccagactagcgccagcattgagaacgagttgaaaattccatacctccgcttcgagcggcctatcaccaaccttgagaacatcgacacatcaaatgtgtattacgtaaactccttcatcgaagcggggaagctgatagcttcggaattttccaagggcaatgtcctgcattttgcaggggctaacaccatggaggacatcctaaagaacatccccacagacaggttttatcccaggatcttgaaagtggaaaaaagcgtggagaaatgcaacgagctcaacattaaccccaaccacattatcccaatgaccggagctgccagcacgaaggagaatatcgagctgatcgaaaagtacaatgccagtgtcatcattactaaggagagcggtgagatagggggagttattgataaaatcgaagcagccaatgcgaaaaacattgccgtggtgatgattcggagaccccagataaaggaaataaataagaaaaatattgtctccaatctggatgaactggatgtggaactgaagaactttttctga

SEQ ID NO: 9590 - DNA, 309 bp, synthetic construct
  source 1..309: mol_type = other DNA
atgaaccaggcaagaatcaagctgaccggaacagatccggaaaaactggcgtacgtttgcgaccaactcaaaaagatcgccgagcggaccggggtggacctgtccgggcctatccccttgccaactaaaaagctggtagtgcccacgcgcaagagcccagacggcgagggtaaggccagctgggagaagtgggaactcaggatacacaaacgccttatcggcattggcgctgacgaacgggccatgcgacaggtcatgaagattaacgtccccgataatgtgagtatcgagattgagctaaaaggatga

SEQ ID NO: 9591 - DNA, 1242 bp, synthetic construct
  source 1..1242: mol_type = other DNA
atggccaaagagaaggagcatcttaatctggcctttattggacacgtggaccacggcaaatccacgctggtgggacatttactgttgaaggctggtgccatcgccgagcagcagttagatgatggtgagaacaaattccgctttgtgatggacaagctgggcgaggagagggaacggggagtcacgatagatctggcgcatcaaaaattcagcaccaaaaagtacgactatactgttgtcgattgtcccggacaccgagacttcgtgaagaacatgattaccggcgcgtcccaggcagacgctggggttctggtagtggcagctgacgacggggtaatgccgcaaacgaaggaacacgttttcctgtcacgcacactagggattggccagctcatcgtggcaatcaacaaaatcgatgtggtggactatagcgaggacaagtacaatgagttgaaggaagaagtggctaacctcatcaagaccgtcggcttcaacccagccgacgtgccattcatcccactgtccgcatttgaaggggacaacattaaagaggccagtgaaaacactccctggtataagggcgactcgctgatggatgccctcgacaagctgacaccacctgagaagcctaccgacctgccgctccggatacccattcaggacgtgtacagcattacaggggtcggcactgtccctgtgggcagagtggagaccggtatcatgaagaaaggtgaaaatgtgatatttgaacccgccggagcctcaggcgaggtgaaatctatagaaatgcaccacgaggtctttgatgtagctgagcctggcgacaacatcggcttcaacgtcaggggcgtcggaaaaaacgatatccggagaggagacgtagctggacataccgacaatgcccccaccgtggccaaggagtttgatgcacaggtggttgtgctacagcaccccggcgtcatcaccgttggatacacgcctgtcttccattgccacacaagccaggtcgcatgcactttcttggagcttagtaaaaaactcaatcctgctacaggggctgttgatgaagaaaatcccgatttcctgaagacaggtaatgcggccattgtgaagatcaagcccaccaagccaatgtgcctcgagaacgcaaaggagatcccgcagatggggaggtttgccatccgtgatatggggcaaactgtggccgccgggctgtgtcttaatgtgaccccagcgaagtga

SEQ ID NO: 9592 - DNA, 2184 bp, synthetic construct
  source 1..2184: mol_type = other DNA
atgatcgcgaaaatcaaagagcttatgtataagccggaccagatccgcaacattgggatctgcgctcacatcgatcatggtaaaaccaccctgagcgacaacttgcttgcaggcgccggaatgatttccgaggagctcgccggtgatcagaggttcctggattttgatgaacaggagcaggcacggggcattactattgacgcagctaacgtatccatggtccacgattacaaggacgacgaatatttaatcaaccttattgatacacccgggcacgtggactttgggggggacgtgacccgtgctatgagggcggtagacggagcagtggtggtcgtgtgcgccgtcgagggtataatgcctcagacagagacagtgttcagacaagccctcaaggaaaacgtcaaaccagttttgttcataaacaaagtggaccggctgatcaacgagctaaagctcgaacccgaggagctgcagaaaaggttcatcaatatctacatggaagcgaataagttaatcaagaacatggctcccgaagacaaaaaagatgattggtcattagacttcaccgatggcagtgtagcctttggcagcgcatatcacaactgggccatcaacgtgccaacaatgcaagaaactggagttaactttaatgacattatccaatattgcaatgaggataagcagaaggagctggcccagaaagttccgctgtctgacgtgctgctaggtatggtggtggaacacctgcccagccctaaggaggcccaggtgtaccgggtgcctaacatatgggacggagacattgaatctcccgccggcgagtgcatggtcaccacttcccccgacggccccctggcagtcatggtgaccaatgtatctgttgacaaacacgccggcgagatcgccaccgggagggtgtacggaggcgcaattgagaaaggcactgaggtctatctcgtgggcagccatggcaagagcagagtgcagcaggtaggggtctacttcggccccgaacgcgttaacacggacaaagtgcctgccggcaacatcgtctatgttgcgggggccaaaggtgctattgcgggggagacgctgtgtgatcccgagcataagatagttgaatttgaaggactggagcacatatccgaacctgttgtgaccgtggctgtggaagccaagaatactaaggacctaccaaagttgattgaggtcctgcgacaggtgggaaaagaggaccccaccgtgaagatagacattaacgaggagacaggggaacacctggtctcaggtatgggagagctccacctagaggtgatcggttaccggataggcgagaagggcgtggatataaccacgtcagaacccatcgtggtctaccgagaaacggtccgccagttgagtccacaggtggagggcaaatcgccgaacaagcataacaggttctacatcactgtggagccgattgagcccgagctctataccgctatccaggacggcgacattaaggagggcaaggttaaaggcaaagagggcgcgaatgacttcatggaacacggcctggaaaaggaggaggctcgacgtgtctgggctgtgcataaccgcagtatcttcctgaacatgacacggggtatccagtacctcgatgaagttaaggagctcctgatcgagggatttgagagtgccttggaaaatgggcctctcgggaatgagattgccatgggattgaagttcaagctccatgatgcaaaacttcatgaagatgcagtgcacagaggacctgctcaagtcctgccggccatccgcaatgcaatccttgggagcatgatgctggctgaaccagccctgctcgagccaatgcagaaggtagtgatcgacacacctaatgattacatgggttcatgtacgcgggaaatccagaatagaagggggcagattgtcaacatggggcaggaaacaggagatatggccagaattgagagcaaggtgcctgtagccgagatgtttgggttcgccggggacatccgctccgctgctgagggcagatgtctgtggtcgaccgaaattgccggatttgaaccacttccacgggagatgcaaaatcagatcgtcaaggagatccgccaacgaaagggactgtccgccgaaccattccccgcaagccactacctgggagatctgtga

SEQ ID NO: 9593 - DNA, 561 bp, synthetic construct
  source 1..561: mol_type = other DNA
atgagtaagttgtttgacaaatgggatctcaatgaggtcaaggtggaggacctggggttggtcaaatatatctgcctcgacgagactctggtgccgcacacatccggccgccacgtcaaaaggcagtttgccaagtctaaagtaagtatagtagaacgcctgatgaacaagatcatgaggacccatctcaacagcggcaagaaaaataaggcttacaacattgtgaaggaatctctagagataatcaataagcgcaccaagcagaaccctgtgcagattttagttaaggcagtggagaacaccgcaccccgggaggagacaacccgaatcaaatacgggggtattggataccaagtggccgtcgatatctcaccacagagacgggttgaccttagcctgggcttcctgactcggggaacgctgcagtcgtccttcaaaaacaggaagtccgtggccgaatgtctcgctgacgaactgatccttgccagcgaagaggattcaagaagcttcgcgctgagaaaagcggaagagaaggagcgagtggccaaggcagcccactga

SEQ ID NO: 9594 - DNA, 426 bp, synthetic construct
  source 1..426: mol_type = other DNA
atgccagggcttttcgccgccaagaagctgaaaaaaaacaggcaaaatttcaagtggaaggatgtcgactacaagcgaagggccctcagactggacgtgaaggcagatcctctcgagggagctccccaggctcgcggaattgtaatcgaaaaggttgggatcgaggccaaacagcctaactctgcgatccgtaagtgcgtccgggtgcagctgatcaagaacggtaaacagctaaccgccttcgcaccaggcgacggcgctatcggctttatagacgaacacgatgaggtgatgatcgagggaattggtggaccgagcggccgctcaatgggggacattcccggggtgcggtggaaagtgtccaaagttaataacgtcgcgttgagcgagatggtgagtggcaagatagaaaaacccgtgagatga

SEQ ID NO: 9595 - DNA, 432 bp, synthetic construct
  source 1..432: mol_type = other DNA
gtgagcatcaagctgagtgccaatgaaattcggttcatagctctgttcgagagcatgaccggagcaatggtgaaggattgcatcatcgatgatgaacacggcaaagtcacgttcattgtgaagaaaggtgatatggggctggctattggcaaagggggcagtagcgtgtcgaaggttcagcgcgccgtagacaaaagcgtggaaatcatcgagctcgacgacgacccaatcatctttatcaaaaatgtgctatcccccgcgaagttgcagtccgtcaagatatcccaaaagcagtcaggggagaaaatagcgattgtcacagcagacaacaccaacaaacgaatcgccatcggcaagaatggaatcaacattgagagagccaagctgctcgccaacaggcagcataacatcgacaacattattcttaagtga

SEQ ID NO: 9596 - DNA, 297 bp, synthetic construct
  source 1..297: mol_type = other DNA
atggacgtcgatcgggggatcagagtcgcggtcgatacgggtgacgtgacactgggctctgaaaaatcaatccagtcccttaagctgggaaaaggccagctcgtggtggtggccgccaacgccccgaaggagctgattgaggacgttgaatattacgcaaatctatccgagattccttttgtggtctacgacggaactagtgtagacctggggagcgtgtgcgggaagcccttcaccgtggctaccctcatcgttaacgacccaggcgacagcacaatactggatgatttgaggtga

SEQ ID NO: 9597 - DNA, 1179 bp, synthetic construct
  source 1..1179: mol_type = other DNA
atggacgagattataactaagattaggggcatgatcacggagatcaacgaaaccgagaatctggggatcgattttgcagacagctacatcaaagacttggcggaacactatatcagtaagaatttgacggacgacgaattacgcaagctcataattaagctcaaacaggcctacgaccgagcccatgtggaagcgggcgaggcggtgggaacagtagcagcccagagcgtgggtgagccgggaacccagatgaccatgaggaccttccactatgccggggtcactgagctgaacgtaacactgggccttccaaggctcatcgaaatcgtcgatgcccgcgagaaaatcaagactcccacaatggatatctatttcacggaagacaagcgggatgatgaggagtttgttagaaccttagctaataaaataggtaagagcaccatcaacgacatccttagcgacttcaatctgaactacggaaccatggaggtcgaggctgttctggacaataagaagatcgaggaaaagcggctcaacagggaggagatcgatgcaaagatcctgaagacatttaagaaagccacaatcaacggggataacatagtgctctccagcaacaagacagactccgacttcatcatcagagaactgcggctgctggccgacaagttccgagatttgcaaattagcggcattaagaatattggacgagtcatcattcggcgcgacgaggaatggataattcacactgaaggatcaaaccttaaagaggtgctcactatggatggcattgaccaggtgcgcactaccaccaacaatatccatgaaattgggcagatcctgggtatagaagcagctcgcaggtccattattaacgaagctcagaaaaccctgtcagagcagggcctttccgtggatgtaagacacattatgctggttgcagatatcatgacctccgagggcgtggtgaagtctattggaagacacggcatcagtggtgagaagtcaagtgtgctcgctcgggccgcctttgaggagacgggcaaacacctactacatgcctcgatccgtggcgaggtggacgacctgacagggatcatcgagaatattattatcggacaacccatacctctggggaccggctctgtcggggtcaaaatggattacaaaaaagaatga

SEQ ID NO: 9598 - DNA, 3006 bp, synthetic construct
  source 1..3006: mol_type = other DNA
atgaaagcatttatcaagaagattcagagaataaactttggtttgatgtcgcccgaggatatccggaagatgtccgttgtcaccgtcgagtatcccgatacatatggcgatgacggctttcccatcgataaaggtctaatggaccctcatctgggtattatagaccctagtctcgtgtgtaggacttgcgggagcaaagggggagtttgtcagggacacttcgggagtatagagctcgcccgaccagtgatccacgttggtttcggggatgttattcataaaatactgcgtagcacctgcaatgagtgcggccggacacttctgacggacgaagagatcgaagagtacacacagaagatcctggaactcaaagcccaaaatgagagcattagcagtatcctcaaggagatatatgatgctgccaaaaaggatggggaggaatgcccccattgcgggaccatccaggataagattgtgctggacaaacccgtttctattgtgcaacgcattgacccacttttcgagtttaagaaggtattttacgaaactgcctcttcggactctattactatcgaagagattgggccaatggctcgcgaaatcgtggagaacaaggaggaactcttccagaataaattgttgattaacagcaacctgctcgagaggctttgtgaaagattgcatgatgtggattacatcattaatatcctggacttggaagatgaggatggtagctatgaggtgaataacacccggctgaacaacatcttcaaaacagcgatcagtgacaacaatcttaccgaggattataagctgaccgccagcgaggtgcgggagcggcttgaaagaatttctgacgaagacagctttgtgctgggggtcaatcctgaggtggccagaccggaatggctggtgctgacagtgcttcccgtgcccccggtgactgtacgcccatcgatcatcctggacactggcgagagaagtgaggacgacttaactcataaactggtagatattctccgtattaatcagcggctcctcgagaacatggaggcaggcgctccacagctgatcgttgaagacctctgggaattactgcagtaccatgtcaccacctactttgataatgaggccagcggcgtgccaccagcaaggcacagatcaggcaggccactgaaaacactaacccagaggctaaaaggtaaagagggacggttcagatccaacctgtccggcaagcgcgttaatttctcagcccggaccgtgatctcaccggaccctaacatcagcatcaatgaagtcggggtgcctgaaatgatagccaaggaagtcacggtgcccgtgcacgtcaacgaatggaacatggatgaaatgcggacatacatagagaatggcccggacgtacatcccggcgcgaactatgtcatcaatggagacaggaagagacgcgtgaccgacgagacaaaggagtacattctggagacactggaacccggcgtcatcatcgagcgacacctgaaagatggggatatggtgctcttcaaccgtcagcctagcctgcaccgcatgagtatgatggcgcacgaagtacgcgtgctcccttacaagacgttcagactaaacttatgcgtctgccctccatacaacgcggatttcgacggggacgagatgaacatgcacgtcttccaaaccgacgagtcccgggccgaggccaagtcactaatgcgcgtacaggagcatatcttgtctccaaggtttggaggaccaatcatcggagctattcacgaccacatctccggcgcatatctgttaactcgtgatggggttgagtttagtgaagagcaggctctccaaattatccgaaagtctcacctcaagatccccgagttcaagtcaaaccagtggattctgaagtatgacagcaatggaaatgaagacagcttcatctacaaagagaagggggagaagtggactggcaaggagttgttctctctgctcttgcctaacgaccttaacctgtcctactccgctgaaatatccaaatgtcctgtggtgtaccctcccgaggacgcggaagttgtcatcaaaaacgggattctcatacagggagtcatagatgagagtgcatacggcagcttctcaggtaaaatactggataagattgttaaagaatacgggcccggacgagccaaggagtttttagaccgatccacggacctcgctatctgcggaatcatgaagaccggaataaccacttccctgaacgacgaagagatccctgaggaggcccaggacagaattaacgagcatctgcagaataagatggatgaggtcgacaagctggtggaggcttatgaggaaggctaccttgaagctctgcccggccgcagtctggaggaaacactcgagatgaagatcatgcaagtgctgggggaagctagggatatgagcggtcagatcgccgaacactacctgaacatgggcaaacagtatcccgacgacccctatgaccacgtgatggccgtggaaaatcactctgttgtcatggcccggactggcgcacgcgcctcaatgctgaacctgacgcagattaccgcttgtgtaggacaacaggcagtgaggggcggccggattgaaagaggctacattaaccgcacgctgccccacttcaagaagggcgagctgggggccaaggccaagggatttgtgcactcatcctataaatccggactcgatccaatcgagtttttcttccatgcaatgggcggacgcgagggtcttgtcgatacagcaatccggaccgcccagagcggttacatgcagcgaaggcttgtgaatgccctacaggacttgcaagtcaagtcgacaggactggtgaccgataaccagggcaatgtgatccagaccatgttcggtgaagatggcgtggacccggcgaaatccgactttgggaagccggcaaacttggacaaacttatcgacgaaattaggatggagggcaagtga

SEQ ID NO: 9599 - DNA, 2226 bp, synthetic construct
  source 1..2226: mol_type = other DNA
atgctaagcgaagactacaagaaacccgagactgacgaaaaaaaggcgttttattacttcggctttgagcgcctagcccctttcaatgaggtggacgtcatcatcacccagctcaaagagaagttgggggatgatgaagaagctctggagaaaattaataagcacgttgaatttatcgagtcatattttgacagcgacgagttgaaggctgatgatagtcttaacgtgccatttaagaaggataagcggcgcgccaagtgggagtcctacaagaaagacttccctgagatagatctgactgaggaggtcgacaccgaggatagcattgagcccgccgaggaagagaccgtggaagaagctatcgtcagtgacgacgagatcgagacggttggggagcagcccaacgtatttaataaaaaacatccccaaactaagatctatattaatggagagctgctgggctattgtgacgacccaataaacttcacccaggagatgagggagaagaggcgaaatggggagataagccacgaaatgaatattacgtactatgccgacaatcaggagatatacatcttcaacgatcccggacgggccagaaggccactaatcatagttaaggacggtgtgcccctgttaaaagaggagcacatcaataagattgccaacggtaaactcaactgggataacttaatcaatgatgggctgattgagtacttggacgcggaggaggaagagaatgcctacatcgcaatgaatcttgccgacctcagtgaggatcacacccatctggaaatcgacccggctaccatgctgggcatttgcgccggcatcatcccattcagcgatcacaacagctcgccacgaaacacaatggaagccggtatgaccaaacaggctctcggactgtatgtgtcaaattatgccctgcgtaccgatacccgggctcacctgctgcaccaccctcagacccctatcgtgaagacacgtattatcgatagcaccaattacgacttacggccctccggccagaacttcgtggtggcactcatgtcttacgagggatacaatatggaagacgccatggtgatcaacaaggcggctctggagcgcggcctggcacgctcctcattcttcagagcctatgacacatcagagaagaaatacgccggcggccaggtcgacaagtttgaggtgcctgataagaacattaaaggctaccgaagcgaggaagcttacaggaacctcgacaacgacggggtggtcaaccccgagtcctacgtcaaatctggggatgtcctgatcgggaaaacgtcacccccaagatttctggaagaaaacttcggcagtgtggcggaccggcgccgcgagacttcggtgactgtaagacatggggagaagggtattgtggacgccgtgctcctcagcgaaacagtggagggctccaaactggccaagattcgcgtcagggacacacgacagccggaatttggcgacaaattcgcatcccggcacgggcagaagggggttatcgggctgatattgagtccggaagatgtgcccttcacggaatttggcgtggtgccagacctcatagtgaaccctcacgcgattccatccaggatgagcatcggacaagtactggagatggtcgccggtaaggctggatgccttgaaggcgaaagggttgatgcaaccccgttcaaccagaccctggaagatgagatccagcagttgcttgtggacaacggatttgagtcggcaggatgcgaaagcctgtacagcggagtaactggtgaaagattggatgcggagatctttgtcggggttgcatattaccaaaagctacaccatatgaccacggacaaggtttatgctcggtctcgtggccctgtccaagttctgacacggcagcctacagaaggcagagctcgggagggcggtcttcgcttcggagaaatggagagggattgcctcattgcccatggcgccgcacttactctgaaagagagactgcttgatgaatccgacaagtatgaggccgtggtctgtgaaaactgtggtatgctggccgtagaggacacaagcaagcataaaaaatactgccccatctgtggagatgtggaaacatatcctgtggagatctcctacgcattcaagttactgttggacgaactcaaaagtctctgcattttccccaagctggtgctcggagacaaggcatga

SEQ ID NO: 9600 - DNA, 1551 bp, synthetic construct
  source 1..1551: mol_type = other DNA
atgacagtgaacaattggaagctggtcgatgcctttttcgataagtatgatctcgtcgaccaccatataaaatcctacaacgactttgtgaataataggattcagaatatcatcgacatcaccgaccctatttcgctggacgatggaaagtacacacttaaaaccgggaaaatacgcatcgagaagccaagcaataaagaagcggacggcagccgcagcatcatcgaccccaccgaggcccgcctgaggaatctgaactattctgcagacatgtatctggagatggcactgaacgaggagggcgaagacaatcccctggaggaggtctacatcggtgagctgccggtgatgcttaaatccgacatctgccatcttaacgggctaagtgatgaggagttaattgccaaacacgaggacccccaagatttaggaggatatttcatagtaaatgggtctgaaagagccgtggtgacaatggaggagattgccccgaataagatcattctcgaacggataggcgaagtggaagaaaggcacgccaaggctgtcgtgacttcaatcaagagtgggttcagagctcgaatcaccctggaatacaagaaaccacggaagaataaggccttcctgcggatatcgttcccatatcttcctggggagatcccactggtcgtgctactccgagcccttggcttgtccacggatcaggaaatcatcaccgctatttctgacgataacaacttccagatgatgattgcggatgacattcaggtgagcgcagaggaactcgacaaattcatagatcagaatgtcattaaaaacggcgacaaggatgaggtgaagcagcatctacaggacgccgctatcaagtacattggcaacagggtcgccaagaacatgcccaaggactatcggtacaaacgcgctaaggatgttattaaccggtacctcctgccccacatgggtattgaggaagagaggtgttacgataaagcaatctatctcgcggaaatgactgaaatgctgttggaggttattgaagagaaaagagagcctcacgacaaggaccactacaccaacaagagacttcgcgtatccggcgacttgatggaggatctctttcgcgttgcttttacaaacctcacaagggacatgagttaccagctggagagatccctgtcacgtggtaaagagctctcaatcaagcaggcagtgcggagcgacgtcctgactgagaacatcaagcatgctatcgccaccggaaactgggttggcggacgcgcgggggtaagccagctgttagatagaacaagctacatgggaactctcagccacttgcgacgtgtggtgtcccctctgacgcgaagtcaacctcacttcgaagcacgggacttgcatccgacgcaatttggtaaaatatgccccaacgaaaccccagagggccccaactgtgggctcgtgaagaatctggccctgctgtgcaacatctcagaaggctctgatgagcaggagattatcgatgttatcggacagatggacgtggaactgatctga

SEQ ID NO: 9601 - DNA, 240 bp, synthetic construct
  source 1..240: mol_type = other DNA
ctcaaatccgaatttgacattcagaagcatatgctggtcccaaagcacgagatcatgacagacgaggagatttcaaacgaatttagcaatctggattacagcttcaagaacctacctaaaatcaaagtagatgacccggtggccgaatctatcggagcaaagcccggggacgttctgaggataacgcgcgaaagtcagaccgcgggcgtgttcgtgacctatcggatcgtcgaggagtga

SEQ ID NO: 9602 - DNA, 867 bp, synthetic construct
  source 1..867: mol_type = other DNA
atgacgaacaataagattgagatcttagacaagatcgaggaaaatcttattaagatccgcgaaaagaacgccttgacccattgcatcacaaatagcgtgacaatcaacgactgcgcgaatgccgtgcttgcaataggcggatcacccttcatggctgaggatgccgaggaactcgaagaagtcgtcgcaatcgctgatgtcctcgtgattaatatcgggaaactgtccaagaaccagattaaagctatggaaatcagctgtaaaaaggctgacgaaacaaacacgcccatcatactcgacccagtaggcgtcggcgtgaccgagctgagaaacaaaataaccatgaacctaattgacaaccacaacattactgcaatcaggggaaacattagtgaggtcaaatccatcgcaaagcttagcggagttctggacgagagcaacactgccaagggggtggatgttaacgtagatgacatcatcactaagcagaacctgaagacaaatggcgagctcatttcaacactggcgtccaagttgaataccgtgatactggccagcggccctatcgacatcctgaccgatggcaaaacaaccatagccattgacaatggagacgatatgatgccgttgatcactggtagcgggtgcatgctgtcctcggtggtgggcagttgtatcggtgggagcaatccactggagggaagtctgatcgcgattctggccatgaacatcgctggcgagaaagcccgggccaaagtggatgagaaggatgagggtaccgggtcctttcgaacgtacctcatcgactatctctacaagaccaatagcgaaagcctaattaacgagtcaaacattatgatactgtga

SEQ ID NO: 9603 - DNA, 621 bp, synthetic construct
  source 1..621: mol_type = other DNA
atgaagaacatcgatctcagcctttacctggtcactgacaaaagtgaagacatcgaaaagttccttaagacaatcgaggagtccataaaaggcggagtcagcatcgtgcagatcagggaaaagacggccgaaacgttggacttctataatctggctttgaaagtgaagaagattaccacaaagtacaacgtgccactgataattaatgatcggatcgatgtagcgctggctattgatgctgacggagttcacgtcgggcagtcggacatgccctgcgacgtgacccgcaagctcatcggcaaagacaaaatcctcggggtgagcgcctctaccataagcgaggcgaaaaaagcacaggaggatggcgccgactacatcggtactggggctgtatttccaactgccaccaaagatgatgccccctcaattacaaagcaagacctaaagaagatcgtggacgcaatcgacattccggtggttgccatcggtggcattaaccatgagaatgcatctgagctgatcgagaccggcatttccggactgtccgtcgtgagtgcgataatgaacgccgagaaccctaagaaggcatcagaagagctgttaaacgtgttcaatgcctga

SEQ ID NO: 9604 - DNA, 777 bp, synthetic construct
  source 1..777: mol_type = other DNA
atgaacaagcaaaggcgcatgcctgtgatctttgtaggtcacggggcccccacgaacgcaattggtgacaatatctacatccccgagtggaagaaagtaggggaatacctggggaaacccaacgtcataatagcggtgagtgctcattggtacagcgagaaactctatgtgaggaccgctaagaagaataagcagatccatgacatgtacggctttccagatgagctgtatcaggtgaaatatgagcccaaggggagcccgagacatgctgaaaaagtcctggagcttttggacattgccgaggagaacaatgattggggaattgaccacggggtctggtccgtgttatcaaatatgtacccagaagccgatgtgcccgtagtgatggtgagcgttaatggtaacctgacccctgttgagcagtttgaaatcggccgcaagcttgagccactgcgacacgaaggcgcactggtgctcggaagtggcaatatcgtgcacaatttgggaatggtggactggagaatgaacggcggatataagtgggcctatgccttcgacaacgacgtgaagaaggctgttctcaacggcgacttcgaacggatcgttaatttccggaacatcaaattcaacgagattgccatcccggccccagatcacttctacccttttctaaacgtcctcggagcggcatccaaagaggataacgtcaagatcttcaacgatgtctgcgaactgggctccatatctatgacatcgtacattttcgaggacatttga

SEQ ID NO: 9605 - DNA, 291 bp, synthetic construct
  source 1..291: mol_type = other DNA
atgcttctgtacatcaatttcctcacccaggtgcacttccagtttaacaacaacataaacgtccaggcagacatccaagagggcaaaagtgaaagcaagctggaagacggggatctcacatggattttcaccgacgagaacactaagcaggtggagctcaactccaagagccttattctagcctatcgcaagggcgactacgagggttttaaagaatttctgaatgatgtatcactgatcctggctgccctgcggtggtgcacgcccttcaatttaacattcttgggatga

SEQ ID NO: 9606 - DNA, 276 bp, synthetic construct
  source 1..276: mol_type = other DNA
ttgctgaaggacgactaccagctgaccttccagtacggctttttcaatcccgagtacccaagcgccaatgccaaaaaggattttatcctcgactatgactgcaaattaatcaaggtggacagcgctaactcccaattcgaagtcgaggaggaactaaaaaagatgaacaagattatctatgataaaagtatactcaagtcaaacttgatgaggattctcaaaaagctgctgcggaaatctatcatccttattatactgaagctgaaggcagattga

SEQ ID NO: 9607 - DNA, 1215 bp, synthetic construct
  source 1..1215: mol_type = other DNA
atggcgaaatttaacaccatcgatgatttcgatgtcgagaacaagacggtgcttgtcagagttgacatcaactcacccgtggaccccggctctggaatcattctcgacgacactagactgaaactgcattcaaaaacgatcaaggagttgagcaagaaaggtgctaaggtagtactcctggcacaccagagccgaccaggcaagaaagacttcacaaccctgagccagcacgccgatgccctttcagacattctgaatctgcgcgtcaagtacgtggacagcttattttccaacgtggccaaggaagccatccgggacctgaagcctcacgaaattctgttacttgaaaatgcacgcttcttcagcgaagagtccctctcgcgcacaccagtggagcagagtaagaccttgctcgtgcgacatctctctccattgattgattactttgttaacgacgccttcgccgcggcccatagaagccaagcttccctggtgggcttcactgtgaataccccttccgctgccggccgggtaatggagaaggagctgactgtgattcaagatgcactggacaacgtgcagcacccctgcgttttcctgctggggggaatgaaacctgacgactcaattgatgtcatggagaatgttctgaacaatgggacagcagatgctattctcacaactggtatcgtgggaaatatcgtcctctgggcgtccggcgtcgatatcggtcaggtgaacaaagatttcatcacgaataggggatatgaggacatggtggaaaagtccagggtgctaatcgagaagtttggagataaagtaaagtacccgatcgacgtggcctgtgagatagacggggagcgggttgacattgatataggcgagatcccggatgagtctatctttgacataggggtcaaaacaatcgcattttatgcaaaagaaattagggacgctaaaaccatattcgctaacgggcccgccggcgtctttgaagaccccaaattcgcaatgggcaccgaagacctgatcaatgccatcgccaactcggacgggttcagtatcataggtggcggacacattgccgccgctaccgctggccttgggtgcgaggatcagatgagccacgtcagcagtggtggcggagcctgcattagtatgctagccgggaagaagctcgcggtggtggaagctttgaagaacaacaagaagtga

SEQ ID NO: 9608 - DNA, 669 bp, synthetic construct
  source 1..669: mol_type = other DNA
atggatacaccaatcgtaatactgaactacaagacctatctcgagagcagtgggataaaagcgctggagcttgcaaacgatctggagtccgccgcctccgagtccggcattaccatggtcgctgtgccccaggctgccgacatttaccgggtcagtcaggaaacttcactccccatcttcgctcagcacgtggactccatttctcctggcggccacaccgggtctaatttgatcaacacactgattgacgccgggataagcggaactctgatcaaccattctgagaaccgcatgaagctggcggacatcgcagaggtgatcaagagctgcagggattacgagatagaatcctgcgtttgcacgaataacattgaaacctcaaaagctgtggccgccctcaatcccgtggctgtggccgtcgagcctccggaactcatcggaacgggcatcccagtcagccaggcccaaccagagattgttgaagacactgtcaaggaggtgaaatcaattaataagaagatcaaggtgttgtgtggtgcaggaatcacaaccggcgatgacatgaagtcggccatggacttaggagcggacggggtgctgctggcaagcggcatcatcaaagcagaaagtcccaaagatgccctgcttgatctcgtaagcaagctatga

SEQ ID NO: 9609 - DNA, 879 bp, synthetic construct
  source 1..879: mol_type = other DNA
atggtcaaaaagactcagactgccagcttcggctccgtgctacggcagtcccataacagccgaaagttttacaactcaaagttgtatgaaaacctgaagatccccgaaaatattgattttaaggagtttaagatcaaaaaagaggacctcaataagctgtactgtaaatcgagtgagaacatggacgagattcccgacaacagcatccacttaatgattacatcccccccttacaacgtcggcaaggagtatgatgatgaccttaccttggacgagtatctggaactactcacttctgtgtttgcgcaaacgtacaagaaactcgtgagtgggggcagggcatgtataaacatagccaacatcggccgcaaaccctacatcccccttcatgccatggtcatcgaaataatgctgaacctgggattcctgatgcggggcgagatcatatgggacaagtctgcttcagctggtggaagctgcgcctgggggagttggatgtctgcgtcaaatcctgttctcagggattttcacgagtatatcctgattttctcaaaggaatcctacagcaaaaacaagtctcaagaaaagaaggacaccattagccacgacgagttcatccagtggacaaaatccatctggacattcccagccgtaaatgcaaaaaaaattggacacccggcaccgttcccaaccgagctgccacacagactgatcaatctgtatagctacgagggggatgtggtgctcgaccctttctgcggtagtggaacgacctgcatcgccgctaccaagaataagagaaactacatcgggtacgatattgaagagaagtatattcagttgtccaagagccgcctttcgaatcagaaattcatctga

SEQ ID NO: 9610 - DNA, 933 bp, synthetic construct
  source 1..933: mol_type = other DNA
atgaacaacattgtaatatatttcctgaaactcttcatctgcctgataattatcgtggttattatgcgcctttggagtaagaaccaggagaaaatctttttcatcaattcccgcaaagtcgcctttccaagccagctcttctacaagaccgatgacggcaggtacttggcatattggccgaaggactacaggggcaggaagagcaccctgcagagcagaaatagcttgatcggcaagttcacagaggagtgggtgtgcaagctctttggacgactgatcgtggacgacgatctgtatctggtgaaacaggccatcattccttccctagggattacctcccggtctccagtcgacctggtgatcagcaccgccaatcggaaaattttaaaggcaagtgaggtaaaagttatttttgaggttaagatgtccatcgtctggaattggcaatacttcgacgattccaataacgtggtggaaatcggagatttcagaactcaccagggaaagcccagtttcacacgttcagactctatcctgaaggctatcgggaaatgcatcggtattcgggtgtcaagcttcgaatcaagtaagattcctatcgtggtgataggcaatgcgccactatcgaatggattctgtaagaaagccgatcacctcaagcgcgtcggggtcatacaagggttttggagcctgaatcctttccccctcaaccatggaaatactcgaaagacgaccccctacggcggctacatccgctttaacaacacgtccgaacttaaacggaaccttgacaacttgttctcgcaggatttaaacttttttagcggcatggagaaccccaagacactcgggaaatacatcgaaattgctaacaacgagaataactatgaagacaagggtctgaaatttctgaagctgataagaaggtattga

SEQ ID NO: 9611 - DNA, 918 bp, synthetic construct
  source 1..918: mol_type = other DNA
atgtccttcaacgagaaccaaattcagaaactggaaaagagcggctatcgcttcgtcgggaagcacagacacgctgccgtaaagacttgccattggacccggcagagcatcgtggagaagggcgtgtgctataaagagaagttttacggcatacagtcacaccgatgtctccagatgtctcctgccgtgccaaattgccaacaggagtgtgaattttgctggcgcgacttgacccatactcagaccgagtgggaagacaacgagtacgatgatcccaagacaatcgtggacgaagctattgaggcacagaacaatctgctctgtggctattacggaaatgacaaggccaacaagaagaaactcgaagagctgaaaaagcccaccaatgcggcgatctcccttgcaggagaacccacgctgtacccgaagattgacgaattgatcggtgagtttaaccacagagacttcactacatttgtcgtgagtaatgggcagtgcgttgacaggctgcggaatctggaaaatgacccatatcaactgtacctttcgctcgatgcccctaacgagaaaattttcaacgaaatctgtaggccgaggattaacgatgcttggaacaatttgaacgagagccttgagacactgtccagtttcaactcccgtacctgcatcaggaatacgtgcgtgaaaggaagaaacatggagcagcccgagaagtatgccgaactaataaagaaggcagaccctgattacgtcgaagtaaaagcctacatgtgtgttggtagttcacgggaccgactgaccctggacaatatgccaacattcgatgaggtgaagagcttcgccaaacgcatcggggatgagtgcggcaaagaactcgtcaacgagtctgagatcagccgggtggtgttactagagtga

SEQ ID NO: 9612 - DNA, 1119 bp, synthetic construct
  source 1..1119: mol_type = other DNA
atgaagttcttcgaaaatgtggccaagcagatttttaacaaggagggcatcccaattttggaagggcatgtcgcctacagcccagaggaagccatgtccataagcagcgagatgggcgtgccagtggtgattaaggcccaggtgctgactggcggacggggcaaagtgggcggagttaaatttgccaacaatcctggagaggccctgaaggtagctgatgagatcttaggaatgcaaatcaaaggggagaccgtcaagcacctgcttatcgaggagaaggctgaaatcctgaacgagttcttcgtcactgtgtcgatagaccgaggtgccagacgccccgtgattatcgcaagtaaggaggggggggtggagattgagaatctagccaagacaaacccggaaaagcttatcaaatattaccccaacccgctgatcgagtttctcccctacgaagcccgcgagatcgcacggaagatgggcgtgtcctcagatttgatttctcctctcggctctatcatctggaagttgtacaacgtctttacaaaatacgactgtgacactgccgaaatcaaccccctcatcacaacgcctaacggactcatagctgcggatgcgaagatggtggtggaaaatgattccctgttcagacaccagaatctcgtgaagaggctccattataaaaggaaagctgttgatttcgtgaagcttaatgggaatattgcagtcatcggcaacggtgcaggtctaaccttaacagctatggacatgataaagctgaacggaggggaaccagccacgttcctggacattgggggcggagctagtgaacaagtcattaaccaggccctgaacatcgtattgaactatgaacctgttaaggtcatatttctgaatgtgctgggaggtattaccaaagccgacgacgtcgcgcgtggcgtgatcaaagctctgaagcagagcgagcggcacgttcccatcgtaatccgcctgaccggcaccaacgaggaggaaggccagaaactgcttgaggaagccgggattccctacgagacctcaatggaaaaggcagcgaaaaaggcagttgacctctgcaatgagctgaaacaggagatgaaatga

SEQ ID NO: 9613 - DNA, 549 bp, synthetic construct
  source 1..549: mol_type = other DNA
atgcggacggagattcgcatctgcggctttggcggtcagggcatcatcctggcagggattattctcgggaagagtgcatgcctcttcgacgggaaggaagccgtgcaaactcagtcgtacggtccggaagcgagaggaggcgcctccaagtgtgaggtggtaattagcgatacggaagtcgactatcccaaagtgcagagtccagacattctggtggcaatgtctaacgaggccctaatcaagtatatcgtggatttgaaagataacgggaccctgatcgttgaccccggaacaaccgatatcgaagatgtcagggactacattgaggagcacaatattaaggtatacgaggcccctgctaccaagacagctaccgacgacataggccttaaaatagtggccaatatagtcatggttggatcaatcacaaagatcactggggtcatatccaaagaagccgctatcaaagcaatcgaggtgagcgtgccaaaaggcaccgagaagaagaacatcagcgctttcgaggcgggatacgccctggtggaatga

SEQ ID NO: 9614 - DNA, 864 bp, synthetic construct
  source 1..864: mol_type = other DNA
atgaatgaaggaaagcagaaccggtttctcccttacctgagagacgaccgattacctcacattttctgccccggttgtgggaatggcgctatcattaacgccttcctggcagctatggagaaggcagagatggactttgataatatagctatggtttccggaattggatgttccagccgcatcccgggataccttaaatgcgacagcctccacaccacgcatggccgggccttgagtttcgctaccgggctgaagacagcgaacaaaaatttggacgtggtggtatttacgggcgatggggacgcggcttccatcgggggtaaccatctgattcacgccgcacgccgcaatatcaacctgactgtgatctgcatcaacaacaatatttatggcatgacagggggccagataagcccgacatctcccaagggctcttttggaactaccgcgccatatgggaatctagattcaccatttaaactggccgaactcgtcgccgccgcaggcgcaacatatagcgcccggtggaccactgtgcaaatagagaacctcgtgacgtccattaaggatggcctgaaaaaccccggattcagcttcatcgaagttgccacacagtgcccaacctacttcggtcgtaagaacaagcttaaaactcctaccgccatggccgctgtcatgaaagcgaacaccgtgttcaagtcggctgccgacaggatgaggcccaaggagctcgaaggcaagatcgtcgtcggggagttcgccaattcccagagaagtgagtttaccgagaacatcgaaaagctgagtgtggaaaagagcggtaacaaaacctcaatcaattcagcatacgagacagagctgtga

SEQ ID NO: 9615 - DNA, 1176 bp, synthetic construct
  source 1..1176: mol_type = other DNA
atggctatcatactgaccctcatcctcgacagtcagaaggagaaagtgggtgtcaagatggctgaggagtttttcatccagggcaatgaagcctgcgctaaaggagcattggccgccgggtgcaggttcttcgccgggtatccaatcacgccatcgacagagattgcagagactctgagccgggatctcccgaaggtgggggggagcttcgttcaaatggaggacgagattgcctccgcaggagcgatcatcggcgctagctgggggggcgctaaagccatgaccgccacttcaggtcccggtatctccctgatgcaagagaatatcggctacgccttcatgactgaaacaccgattgtcttcgtgaatgtgcagcgcggtagcccctccaccgcgcaacccaccatggcagcccaggcggacatgatgcaggcacgatggggtagccacggggactatgaacccattgcactgagccccagctccgtccaggaattttttgatttcacaatcaaggcttttaatttggcggaggagtaccgggttcccgtatttgtcatggccgacgagatcattggccacatgagagaaaagataaccgttccggagaacatcgaaatcgtggccagaaagcggccagagaagacggacgattatctgccattcgaaaatattgagaacggaaccacacccatgccagcctttggggacggattcaacgtgcatgtgaccggacttactcacgacgagcgaggctaccctgacacaaacacccctgaaactcacgaaaaactcatcaagaggatctgtaacaaagtcctgatgaacagggataaaatttgctctgtacgcagtgaaaactgtgaagatgctgacatcgtcatcgtttcatatggcgcccctgttcgctctgtggtagaggccgtgaacaagacagataaaaaggtcggctacattaaaatagataccccatggcctttccctgacgaacagattaaagagctgacggcaacggccagtgacgtgctagtcgtggaaatgaatctcggccagatgtactacgaggtggatagagtggtgaaggataagaatgtgcatctgcttggcaagatagggggagctctgcccacccctgacgagatattagacgagattaacaagatcggaggcaactga

SEQ ID NO: 9616 - DNA, 273 bp, synthetic construct
  source 1..273: mol_type = other DNA
ctgattatcatagatgaaaacctatgtaaggggtgtcacctctgcctgttcatgtgtcatgagaacgtatacgcaataagcagcgaggtgaataagaagggagtccagctcccattcgtgaagtttgaggaacggtgcattaaatgcggcacctgtgagatcgcgtgccccgaccaggccatcacggtggacctgccggaaaactggtggatgaaagacggcaataatatcaactttaaccctaggttcacaaaaggtaagtccgggtgctga

SEQ ID NO: 9617 - DNA, 492 bp, synthetic construct
  source 1..492: mol_type = other DNA
atgaaggacctgaatacacctatcaccgacgaggacctgttgaacctcaacataggagatcagatcactatttctgggacaatatatacgggcagggatgccgcccttccacagctggttgagctgatcaaagagaagaaggtgccatttgatctgaatggcagtgtcataatgcacactgcattcagtaacgcaggaatcgcgcccaccacgagcagcaaagtggaaatcgaatcgaccatcccctacctctccgaaaacggcattaaaattcacattggaaaggggatgctcagcgacgagaccatcaaagagctagataagaataactccattttcgtaatcaccccccctgtggccgccctgcttacatccaaggtcctggacaaaaagtgcgtcctctttgagtcagagggcatggaagctatgttcaagttaaaggtggaacgcatcccggggatcgtggctatccataacggtttgcggatttga

SEQ ID NO: 9618 - DNA, 735 bp, synthetic construct
  source 1..735: mol_type = other DNA
atggccgtagacaacggagattttgtcagagtcaatttcacagggaaagtgaaggaaaccgacgaagtgtttgataccacttatgatgaaattgcccaggaagccggccttttcgatgagaacaagacatacaagccaattccgatcgtggtcgggggaaaccacctattgcccgccatagaagaggcaatcattggactcgaagaaggagagacaaaacacatcgaggtcgattcagacaacgcgtttgggccccgagaccctaagatggtgcagctggtgcccatgaaggagttcaagaagcagggcatgacgccattcccaggtatgaggattcaaagtgaggggagcaacggcaaaatcctcaccgtaaatggtggccgggtcaaggttgactttaaccatgaactggcaggcaaagacctggtttatgacgtggaggtcactgagatcatcgccgatgaggaggacaagatcaaaagcatgatcgaactgcactacgctaatcctaacgtggatattgacaaaaccgagatcgacattgtggacggggtggcaaacataaaactggatgaaatggcgaagttcgaccagaagtcttacatggatgtgacgttcgcccggttccgcatagctaaagacatctgggataatgtggaaggcatcaccaaggttaatttcgtagatgagtttgagaaaaaggaggagtccgacgacgaggtggaggaagagtga

SEQ ID NO: 9619 - DNA, 1095 bp, synthetic construct
  source 1..1095: mol_type = other DNA
atgaagagacgaggagtcgcgaacctgcccctccatggaggccatcccccaaaatggctgttcacccgcatggtggacctcagcggggccctcgctagcgtcatcattgaagagtattccctgaatgagtttctgaataggatttccaacccatactggtttcaggcattctcctgtgttttaggcttcgactggcacagctcaggaaccaccactacaacattgggagcccttaaagcttccctgagtcctgaggaacacggcatctatttgagtgggggcaaaggtgccaaaagcagaaagacaccgcaaggcattgaacacgccggggaaatcttcaatctaaagaccgaaacgactgaaaagctggtggaaactagtaagctgtcggccaagatcgacaacagctgcattcaggacggctacacgctgtaccagcatgacttcttcatcactgagaaaggggactgggctgtggtgcagcaaggactaaacacctacacaaagtacgccagacgatatcattggctgggttctgaagtggaggagcttctgaatgacccccattccgggatttcatgcgataagaaaaccccagatacacttaacatgtcttcaaaagactccgccaacgctcagaaggtctcggtggatctgatcaacgacaacccaaaccacctcaggcagtactttaagaggaagaatagtcagatgctgctcgacgatttcacaatgcctagccaccaccctatcctcgacatggatattagcgataaggagttcgaagtactgacgcgggcctacgagatacagccggagaattacgaggagttaatactgctgcaggggatgggccccaagaagatccgcgcactcgctctaatctcagatttggtctatggtgagcctgcaagctggaaagatcccgtaaaatacagctttacccacggcggcaaggatggatttccatatcccgttgatcgggacgtgtatgataactctatccaaaccatacgggacgcgctggaccaggcccacatcaagaaggatgagaaacttaaggcaattaaacgcttggacgactttatcctctga

SEQ ID NO: 9620 - DNA, 540 bp, synthetic construct
  source 1..540: mol_type = other DNA
atgaatgtcaacgtgctgcgcctagatcatcggctcaaaagggacaccagaatcaccactcacgtttgcctgactgctcgggccttcggagcaagtaaaatctacctttcgggtgaacgcgatgccaaactcatggagaatgtcagggacacagcttcaagattcggtggaaacttcgagatagagtactccgagtcctacatgggcgtcatcaagaaatggaaatcagacgggggcaaggtggtccacctgaccatgtatggctcccaggcgcacgagattgcccctgaagtacgagaggatggcagcgacatcttaattgtggttgggggctctaaggtgcccggaagtgtgtataaggccgccgactggaacgtgtctgtgacaacccaaccgcacagcgaggtaagcagcctggcagtctttcagcatctgctgatgaacgggaaggaatttgatctcaagttcgaaaaccccgttttggaggtgatcccaacggcgcatgggaagaacgtgaatattcacaatgaaaaccgttga

SEQ ID NO: 9621 - DNA, 783 bp, synthetic construct
  source 1..783: mol_type = other DNA
atggaggacgacagctattttgagaatgaagagttttccccaataaaatcactgctggggcttctgaccttctcgacaatcctcccaatcaatgtgtacaccagcatcgagtacatgacaaagctcacgtggtgctggcctttcttgcacgtgttggtcggtatcttagctgctgtgtgtggatacgtaagcttcgaagtcctacatctgaacgccctcttcaccgccgtgattgtgtacgcgtttctgatgctgatcacggggtataaccacttggacggagtcatggacatggctgatggcgtgatggttcacggcgatcccgagcggaagatctccgtaatgaaagatagcagcgtaggggccggtggcgttgccactctgtttctcgtggcaagtctgacgatcgccggattatacaatatcctcgactactatttcatactggggattatagtctgcgaaatggccgctaagactagcttgatcaccaccgcactgctgagcaagcccctcatcccgggaattggctcctactttattaaagagaccacaattgtgaactatctcgtgtccacaatccttgtcatttgcatagcgttcctgctggggaacctaatcggtgtggttggcgtgcttggcgctatcgtggggggcattatcatagcaaccatttcaaagaggaatttcatcctcgccaacggcgatgtccttggaatgagtaacgaaactggacgcctgttcgccctactgtttatggcaattgccctgtatttcatctga

SEQ ID NO: 9622 - DNA, 2115 bp, synthetic construct
  source 1..2115: mol_type = other DNA
atgacgacagaatttatcatccgcatggatgatatgcccaagattatacacaacgacttgagcgactctctggacgtggagtctatcctgaagaaggattacaaatacatttatgaggctatccagaacgagggcttcataatcgaaaataattcaggagaccttttcaaggagatactctttgatagtaaggtggtgggatttgctttttatgaactcaatgcactcactagctttgttctgaacgaggtgtacatcttacctgagtttaggggtaactctttattcctcttggagattaatgtcctccttagcgccggcaacacactcagtattcttcagccaaccaagaaccttgtagagatcctgatccattatgggtttgccagcaagctgagcgaaaacattgtagccagtgccattggctttgatttcaaaagtgaaaatatcctgtccaattccagtgaggagtttgacaatgacgaccagatactgagctccaacatatatgatctggatatccggtcctgcctattccttaaggacatctccactcctgggaaaaatattatttactaccacgaagagcttaagaatgattttaaagaatatggggagcgtaaatccctcaacaagaattacttcaacgaaatcaaagacctcttcttgcaaaacagcgatgaatttacccaaatcctgttcgatctgaaagaagagctgccgaagtctcagctgggctttgatgtcgtcatcggaaatgatgacggcttctcagagtacatgcaggacatcattgatgacggcatcatttcagaggacaaagcaaagaaaattaacaacatcctgaaagaggagtatgagcgaggtgaggtgaccgacgatggcattataacccggctgaacttctttatcaatgatctcgattcgcaaatcgaccctttcaacatctttgaaatcggtgcgaacttgtgcccatactgttgcaacttcataaatctgacagacgaatcatgtccaatctgcggttataacctattctatgaaaatgatttcgatttcgaagatgatgacaactttgaagacggaatattcatcaacaaggacaacgtgctgtccgttatgtccggcctgtatgagcgattcggcagaaaatacaaacttgaagacattaattatggcaagcagtaccccaccagttacgacctcgaccagtaccgcatcttaaaattcattgacgaataccacaatctggaagtggccttctacttcctgaacaatctaaagctgccccaggagatcttcaacgacctgttgtttgaggaggaatacgtgacgtacgaaattacggaagagacatggtctgacttcgcgaattacagcctgaccgtcaacgatctcaaagatattctcagagacaacgggctaagggtgagcggaagaaaacaggaactcatcgacaggatcgggaagtccgatatctctgtgagcgaatttagctccgacaaactgttcctgaccagaaaagggaaagactacttaaacgagtatagctggatcggcctatacaatgagtttttgaagaacttcgatttcgacgacttttaccggttctacgagtctaacgacggaaacttcaacgagattgtctccaaatatcttgacgagcacatcaagatagctaagaataacaaggatttcgattatttgataaactgcttctcatcgaaggcaatctttagcgggctggacaagaaccccaatgacgcactgaagtgggagatgcgcaggttctgtctgacaatcaacccgatctacagccggggggtgtatcatgatttctatctgcacctgaatagtgagaacatcaacaacctccgatccctcaaagacgagttctcaagtgaggagatgttggactcgttcgaggagtcttgggactactttgaatttaacaagtccattgtttcgaagaaggacgctaagattatttttgaacggctgctgattaataatgaggatttgaagctcattaacatggagcttaaggacaggtacagcggacgcgacgccatcgataatactttctcagccgatctgaatgactattttaagtga

SEQ ID NO: 9623 - DNA, 1083 bp, synthetic construct
  source 1..1083: mol_type = other DNA
atggagctaaatatcacgaagaaggattatggaatctgtataaacaaccccaaccacttcctcgcccttagtgacttcacagtcagtgatgggattgatattgtcgagaacgtcaatgtggtgaaggccaaagacgagttcaaagccactgccaaaaaagctgaggcattcaaccaatccaaaggttcctatattgctcaggctagcgacagcatcgattacttccagaacaattatgacgacctgaccatctttacattcatggcaaatgatgttgttatcgaagacttcaccgagtacctcaaggtcgccaactcgcccaaaggcttctttgatgccagaattaacttaagccacatcatctacatcgacagcgtggtgtctccaaaggacttgctgaagatctttaagatagtgacgaacaccaaagcaaaggtcctggctaacatgtgcctgccggcgcacatccagaacataatcaacacaaatgacttcctggccgtgctctccaacattaatgtctctgaaagtcaagaccttgacattaacaacgccgagtatgaagaaatagattgggatgatctgaaaatcaagatggaagatgccgtggaaatctccctggaggacgcatttagctacctggaactcacctttggaattttggactatttggtatcagagggtatcttaattggagaccttgtggacaccgggatggagctcgcaaatggggtgaagataactcaggagctgcgggataagatggagacccagatccttaagagcctgacagacatcaatgtggtttccctaattatcgctggcatgcgcatggaacaggatctgacgggcaatcacatcagggagtttgatgtgcatgacgactcagactacctctacaccgacgaagtattggggctcgctatttcaaatcagattgccgggacaaaagcaactttcaactttaagcgataccatgaggccaagccaggcattatcgcgggactgcctcccatcctcgacgatatctttgccggcctgattgcgggctgcatgagcaagatattcgaggagctgctgtga

SEQ ID NO: 9624 - DNA, 1170 bp, synthetic construct
  source 1..1170: mol_type = other DNA
atggccattatcattgaccctcaagtaagcggcattgccggaaacatgctgattggcgcgttcgtggacctgggtgcagatgccaacaaactaaaggaagttatggagaaatccgcagagtgcttcgggaaggtggaagttacattcaaaaagataaataaaaagggaatctcctctacatactgccatgttgagatgctggaacacaaacactccatttgctatcccaagttcattgaaaagattaagaagctggacctggacaaaaaggtgaaagagacctcaatcaaagtatttgagcgcatcgccatcgcagagagtaagatccatggaaagactctcgattccgtccattttcacgaggtaggggccagcgatgctgtcgccgatgttatcggctcaatctacgcctattactcccttaacctggacaatcagaaaattatcggcctcccaatcgccgtgggagggggccgtgtcgagactgcacatggcattatacccgtgcccgctcctgctgtcgtggaggtcctgaagaacgcaaagatgattggggggccagtggacagtgaactggcaaccccaactggagccgccgtgtacatggagatctgtgatgaaatcaaagagtttatacccctcattaaagcgaaaaagaccggttacggtgctggcaagaaggactttgaccaccctaacgtgttaaggatcatcgaaagcagcgatatcgcggagtcggacaagattgatgtgattgagaccaatatggaccacttgaccggggaggaaatcggctacttgttcgacaaactcctagacattggtgccagagatgtcagcgtcacgcctatcattatgaagaagaacagacccggcaatctccttaaggtgatctctcggaaagaaaacagggagaaagtgattgaagccatcttcaaagaaacgggctcgttgggcatccgaatagctccaaatatgcaccggggaatctcaaagagggagtttagcaagcagatcttcaacataaatgataaggactatgaggtgacattcaagatagggtacctgaacggggaaatcatctctaaacggccggagtatgaggacctgaagaagatcgctcaggatagcggacttccgctgaaaaagataagtgagatgatccgctga

SEQ ID NO: 9625 - DNA, 678 bp, synthetic construct
  source 1..678: mol_type = other DNA
atgaaaaaggctatctcaatcttttccgggggcctggactgtactgtggcaacaagcgttttctccaagagccacaaaattcacgcgatcaccttcaattacggtcagaaagccttcaaaagagagttaaaggcctcaaaggagatctgcaagaagatggattggactcatgaggtcattgacctcccctggctagccaatatcagtaactcgagcctgaataccaatgagaaaatccccgagcttagcgctgaagatctcgacaacctgaagataagtcaagagtccgccagtagtgtgtgggtaccagccaggaacacggtgttcacctccatcgccttgtcttacgctgaatccatcggcgcaagcagcataattgtggggtggaacggcgaggagggagcgacatttcccgacaactcaaagggatatatgaaaaagtttaatgaactgatcaaggaaggcagccctgaaaacatccgcattgaggcaccactcattgatctggacaaagaagaaattgtgaagctgggagtcgagtatgatgctccgatggagcttagctattcttgctacaaaggcaagaagaagcagtgtgggatctgcgaatcctgcatgcggcggaagcgagccttcaagaacctgggtataaaagacaaatcggagtacgagaactga

SEQ ID NO: 9626 - DNA, 999 bp, synthetic construct
  source 1..999: mol_type = other DNA
atggccaaagaggaccggagtgagataaacccattcaccggtagaaagcattatgataagattaatgatgacaaattcctcaaggagtcatacaaggaatactacagcatgatcgatcaggtacaactcctggataacactcagaatggccagatcgtcattaatgtggcgctgaacttaatcaacgccgtcaactcctatctttcggagatcggcaggctggactacgtggaggactactatgactgggacgtgcacttggttggagataacgctgtaaacgctttctgcatgcctgggggtaagattgtgatgttctccggcattctgagcgtggccaataccgaagaaaagatagccttcatcctgggtcatgaaatggctcacgcccttctggaccacgctcgcaccaggatcagtgctcagaatactcagaacgccataacgtccgcagcctggattggctccatcgcaatggatttttttggccttggggaactgggcagtctaacacgggccgccactaacgttgcaagcatcgggtctcagttcctcctaatgaatagttggggaagggaccaggagctggaagctgacagactgggcatgatgatcatccactgggccggttacgacgtcagccgcattcccgcattctggcgagatatgtcaatgcaaaattctaacgagcatgacttcttttccacacaccccgcagatagcaaacgtatcgcgacgatgcagcaattgatcgtcgagatagcaaacgacaatgatttctatagcaaaccagtcattggggatgtgaatcagaccaacgtgaagtcggtttcttcagagggggggttctgttcaaactgcggaaatccggtggacattgacgcgaaattttgcacaagcagcggaaccaagctcgatgtgggactccggtgtcccaactgcggctccgccgtgggaaacaatgacgtgttttgtatcaactgcggctttaagctgtga

SEQ ID NO: 9627 - DNA, 999 bp, synthetic construct
  source 1..999: mol_type = other DNA
atgaaggacattttcgataacgtgcagttcggcgacctgaaacttaacagccggatagtgagaacaggtacgtgggagacggaaacctccgaaggaggcttcctcacccctgacatctatgatcgctatgaaaagatcgccagcagtgggacagggctgatcgtctctgagatgttcgccctggaccacaaggatagattttacccttattcaaccaatatgaactacagggggttcattaaggattaccagatggtcactgacattgcccacaagtatgacgtgccaattttcggtcaattggcattcttctactatgatgacggcgaaaatcagaaggtagaggcgaatgatatcgctcaggagggcatcaggaaattgcaggccgaggtaatcatggcagctaaaaagttcagctttgctggattcgacggaatccagatcaacatggggaataacttttacctatcacgcttcatgaacccctacttcaaccaacgggacgataagtacggcgggaatactgagaatcgggtccgaatttcagctgagataatcaaggtgatcaagaagaccatggacatccacgtgtcctgcaggattaatccgtgggatgccagaaaggacggaatgaccgccgacgagtcgatcgcaatcgccaaagaacttgaaaaagccggcgccgattccattcagctcaccgcacgcacaattagccagatttacgataaaggcgagaagcatccatttctggtgtacgttgaaaaactgatagacgcagtggacatccccgtggttttagggggctctctgcgagatatgaaaacaataaatgatgtgctgaacagctcgacggtggagtatatcagcatgtccaagccctttgttgcccaggcggactttctcgctgactggaaggcgaacggtgagggagtcagcgtctgtcaaagttgtaacaactgctactccaagaaaactagtacctgctttaaattttga

SEQ ID NO: 9628 - DNA, 216 bp, synthetic construct
  source 1..216: mol_type = other DNA
atggtgaatccaattatcgccgctattatcagctttttcctgcccggcatagggcagatcatacagggagcggacgtgaagaaaggcatcatcatgttcgtaattgctatcattcttggctggctactcgtcaacttcctcgggagcctgggaaacattatatactgcatctatgccctgtatgcagcctacgatgcatacaagatcgaggcctga

SEQ ID NO: 9629 - DNA, 1716 bp, synthetic construct
  source 1..1716: mol_type = other DNA
atgatggcaaaggtaaggttcacagaaaccgcactgcgggatgcccaccagagcctgcttgcaaccagaatgcgcaccagagacatgatccctgttgcgaaggagatggacaaggtcgggtactttagcgtagaggcttggggcggggccacgtttgacacgtgcatccgttatctcaatgaagacccatgggagcggctgcgccagctaaagagcgaatttaagaagacgccgattcagatgctgctcagagggcaaaatctggtgggttataagcactaccctgacgacattgtgacaaagttcgtggagaaatcctacgaaaatggtgtggatattttccgagtcttcgatgctctgaacgacgtgcgcaacatggagaaggcgataactgtggctaaggaccagggggcgcatgtccagggaaccattagctataccatatcccccgtgcacactatagacggctttgtcgatctcgctaagcatcttgaagccctggattgtgactccgtggccgttaaagatatggccggtttgataacccccgcagccgcctacgagctggtcagcaagttgaaagaggagactgatctactggtggatctccattgtcactgcactagtgggatgaccccaatcagttattacgcagcctgccaagcgggcgttgatatcctcgacactgccatttcacccctcgcatggggaacaagccagcccccaacagaaagtatggtggccgctctacagggcaccgagtttgataccgggctggatctcaaattgttggcttctattaaagaatacttcgaggacatcaaggagaaatatctcggcatccttgatcctatcagcacatccatcgacgctgatgtattactgtatcagattcccggaggaatgctgagcaatctgatttcccagcttaaagagcagaatgccctggacaggtacaacgacgtcttggacgaaatgcctcgagtgcggaaggacatgggctaccctcctctggtcacgccaacatcccaaattgtgggcatacaatcggtcatgaacgtgctgggcggggaaaggtacaagacagtgtctaatgaggtgaaggattacatgaaaggaatgtacggcaaaccaccagcccccgtggacgagaagctgtcgaaaaagattttaggggatgaggagatcatctcatgccggcccgccgacctgctggagccggaatttgacaaaatcaaagcagacggtaaggagaagggattcgttaaatccgatgaggatgcgttaacgtacgccctgtacccccccatcgccccgaagttcctcaagggagagactgtagaggaggaacttaaggccccccacgcattcagtgaggacgaggctattggcatcccaacccagtataacgtggaagttgacggagacatgtatgaagtcaaaatcatgcctacaggcttcatggagatcgaagaggctgataatggtaacttccacccggtggaagggggagtgactagctcaatgaacggcatggtaatcaaactgaaagtgaacgtgggggacaaggtcaccaaaggatcaaccatatgtgttattgaagctatgaagatggagaacgacatccagtctgaggttgacggtgtggtggaggaaatctttgtcgaacctggcgatgccgtgaacgccggcgacaccctcatggtcatcaagtga

SEQ ID NO: 9630 - DNA, 1095 bp, synthetic construct
  source 1..1095: mol_type = other DNA
ctgaataaaattaaaatagccatcgtgggaataggcaactgtgccagtagcctcatccagggaatacactactatgacggcaagaaccccgaagacgcaatagggctgatgcattgggacatcggcggatacgagcccagtgacattgaggtggttgcagcttttgatgtggacgctcgcaaagtgggcaagaccattgacgaggcgattttcgctaaaccaaactgcacaacggtgtttcaggaggacatccctaagtacgacgcgaaagtatccatgggccacgtcctggatggggtggccgagcacatgtctaactacgatgatgagtacaccttcgttgtctccgacgaagatcccgtggatgtggtcgaagtcctgaaggagtccggcgcagagatactagtgaattacttgcctgtgggttcagaaaaggcagcacgctattacgctcagtgcgctctggacgccggggtggcctatgtcaattgtatgccggtcttcatcgtcagcgatgacgaatgggacgtgaagttcaaagccaaaggaatcccaatcgttggcgacgatattaaggcccagatcggcgccacgatcacacaccgaacactagcgagtctctttatggatcgcggggtaaaactcgacaagacctatcagatcaacaccggtggcaacaccgactttctgaacatgctgaaccgggaaagactggactcaaagaaagaaagcaagactgaagccgtgcaatcagttctgaaggagcggatggacgatagggacatccacattggtccgagcgattatgtgccatggcaaaatgataataagctgtgcttccttagaatggagggtcgaacatttggggacgtgccaatgaacattgaacttcggctctccgtcgaggacagccccaacagcgccggatgtgtaatcgacgctgttagatgctgcaagattggattagagagggggattggcggacagctcacctccatcagctcttacactatgaagcatcctcccatccagtacactgatgatgaggccttcgagaatgtggaaaagttcatctcgggggatttggagaggtga

SEQ ID NO: 9631 - DNA, 846 bp, synthetic construct
  source 1..846: mol_type = other DNA
atgaatccatatatagagattctccgccccggcaacgccttgatgggtgccatatccatcatcctcgtggccctcattgataagaccatctcaatccccgtaattcttgctatgattgctgtcttttttgaaaccagcgcgggaaatgtgatcaacgattactttgactacaaaatcgatctcatcaacaagcctgaaaggccaatcccgtctggccggattagtctcaagaatgggagaaactacgggtactcactgtttgccgctggcaccgtctgtggtttcctgatcagctacatcacgaacaactggattccatttggaattgtcctgttcgcagacatcatcctttatctctatgcatacacattaaaaactacacctctgattgggaacctgaccgtggggttcatgaccggcttcggattcgtgttcggcggcttttccatcaacaaccccaatattataataacttcgctgttcctgggcttttttgcattcgttatgacaacagcccgggagatcgtgaaggacatcgaagatattgagggagacaaaactgacggtgcgaagacgttaccgatcctgattggggagaaaaaacccgccatacttgccgctatcctgataatcattgacagtgccttgtgccctcttctgtattactaccacatcttcggaatcttgtatctcgtagtgatcgcctttgctgtcatgctgttcatctactccgcaattctgatcctgaagagccagaagcgagagatcgcggcaaaggttagcaaaaatctgaagattggcatgctaattgctttcgtggccttcatcttcgggtctctaatatga

SEQ ID NO: 9632 - DNA, 1578 bp, synthetic construct
  source 1..1578: mol_type = other DNA
atgtttaaggagttcaacatcaacaggaaggacaagtactatctgatcgctatcctgatcttcagcgcaattctagtcggctattatattaactttaataatgcaataggcatctcatgctcagatgtttatatttacctcatcaactctctgtattacactggtgaaaaggtaaacatcacaaactttatccatatttctccggttgtctgttttctgacttctctgttttttagggtggggtttgtggataaattggctatctatgttgttactggttttttcgcgatcatcggcaacatcgggttctacttactgctgaaaaagtttttcaacgaggagttgagcttgaccgggacgatactgtactcctccttctcgctttatctcatctggcttgcaaacggcacactggacatccctgcaacgggtgtgatcatctggattgccctgtttacaatgattgccgtgcgagagaacccaaagtactaccagtacctcatccctctgatggtcatcggcctctacacccggtacaccgtgattctgaccctccctgccttcttcttattctacgtgctcgagaacgggttcaagattaagcccgaagactggaaatacattaagcgcggaatcatcatcgccaccatcatagctatcacagtgttcctaatagtgtttactatgggaaatggccggtttgacgccgcttcccagatggcgaacggcgtaaaggggacaaatggagagctcaccgatcccgcctacaatcccgatagttcctattactttatgaattatatcaattacatttcaaatagccacactgtcttcgagataaacccgaccctgtactcccctacgatcctggcctatgctatctacgcattgctgtttattggggccgggttctggctgtatgaccacaaaaaagtcaactttagaaaaacagatgcgattagcattatcataatcctcatgggtatcataagtttcacccgcgtgaccagcgtgattacgtccattctcatttacattggaatttatctgctcgccagagacagggagtataatgatggagtcttcatgctgggctggatcttggcaaatgctattttcctgagcttcaacatagtgaaagttaaccgttacataatccccacattcccaccattcatcttctttgtcttaacggccattgagactattcacgcgcacgtcaagattaacaagaacatgatacccctagccctgatagtactttttgtgattcaggctttcgccttcaccgccaccgtggaaccaacagacaaatacatgagtcccgaagaaatctcgaactacataatcgacagcaatccggactatgagaacatgaccattggagtgtacaacatccggccatacagctggtgggtgggctcaaataccatcggcatcccttccagccatcaaagtgaaatcgagcagagcaacattagttattacatcgtgaacaagcccatggacaaccttaccaacttcactgagatcaaaaatatcaatgaactttatctgtacaagaataataatttctga

SEQ ID NO: 9633 - DNA, 1575 bp, synthetic construct
  source 1..1575: mol_type = other DNA
atgttcaacgagttcaacataaataagaaggataagatttacctcattgctatccttatattcagtgccattctagtcggctattatatcaacttcaataacgccattggtatttcctgcagcgacgtttatgtttatctcctgaatgccctttattacaccggaaccaacgtacactcaatcgacaacatcttcttgtctccggtggtctgttttctgacttctctgttttttcgcgcggggtttgtggataaactggctatctatgtggttactgggttttttgcgattatcggcaatattggtttttaccttctgctcaaaaagttctttaacgaagaactcagcctgaccgggacgatactgtactcctcattctcactgtatctgatctggctcgctaacggaaccctggacatccctgccacaggagtgattatctggatcgccctctttaccatgattgccgttagggagaacccaaaatactaccagtacttgatccccttgatggtaatcggactgtatacacggtacactgtcatcttaaccctgccagcattcttcctgttctatgtgctcgagaacggcttcaaaatcaaaccagaggactggaaatacataaaaaggggcatcatcatcgccacaatcatcgcaataacagtcttcctaagagtttatgggatgggcaacgggcaattcgaagccggctcgcagatcgccaatggggtgaagggaaccaatggcgaactcacagatcccgcctacaacccggatatcagctactatttgacgaacttccccaacttcatctccaacagccatactatctttgagtcgaatcctgtcctggaataccctaccccattaagctttgcagtcttcgcactcctgtttatcggcatcggattttggctgtacgacaataagctaaaggctgagaagagagatgtgatccctgtgattttgattctgattggcatcatcagtttcacacgtgtgacctccgtggctacaaccctccttattctcattgctttctacctgattgggaaaaatagtgagcataagaatgagctgttcatgcttatttggatactggctaatgccatcttctttagctatcacatcattaaggtgaaccgatacatcctgcccatagtgcccccattcatctttttcatactgctcgcgatcaacaccatccctgagcacatcaacatcaacaagaatgtgattccgattgtccttatcgccctgttcgcgattcaggctttcgcattcacggcaacagtggagcccacgaacaagtatttggcaactgaagagatatccaattacatcattgacagtaaccccgactacgaaaatatgaccattggcgtgtacaacatacggccctacagctggtggattggtccaaacacgatcattcttcacgccgacgcccctggagagattgaccagtccaatgtcagctactacatctcacagagccgcatagataacctaaaaaattttactgaggtaaagaatagcggcggtctgcacttatatgaaaacaacaatttttga

SEQ ID NO: 9634 - DNA, 1545 bp, synthetic construct
  source 1..1545: mol_type = other DNA
atgaaggtggtctgctgcaagaactgtggtgcaaagtaccagctcgacgatgatgatgacatatccacattcgagtgctcttcatgtgccggggacctcgagtacctcgagaactattctaacggcaaagagtctaatcaatccttcgttagctccactaaatataatgactcatacatcgtacaatgtcaggaatgcggactgaagtacaaaattaaaagtagtgacagcatactggactacgaatgcgacagttgcgggggatctctgagatacctcgatgacgagatgaataaggagctggatagctacctggaggagagacacgccgagctgcagaacatcaggaaggaatccaaaccgaaggagccaacttctgaggaaatcaacacagaagacaacacccccagcatcaagtcgattaccgataagctggagaacttcttctccgaggagcacatgttgcagatagccgatatcgagaagaaggaggaggaagaaattcaggagcaggtcatcagcaaaacagcccgtaccaccataccccaatccgtgctctcccgctttggcaaggagtttgctacgcccaagaccgaggattacgacatcctaaagaatttcctgaagacagaatttttcaaaggcatggatgaatactatccaaaagacaataagctaaagtcgaacaaaagctttcttgataaaatcagccttaaggaacccgataacggcgagtcaaagcctgtcaagagttccatcataaacaataacagcaaattcaacctggaaaactttaacgttgagaacatagagagcaacaataccatcattatcatcggggtagtgattttcatcttgagcattatcgaggtgctgaccatcaacagtgggatcggaattattgcgctgttcatcggagtgattattctttgttatggaatctataagacgcgcgacgtgaagcaggacgaggaacggacaaggattatccgggagcacttgttaagtctgcctgaggagttctacgtcttctacaacgttaaaatcccaacgtccactagcggcatcaatcatgtggtggtcggtccgaccggcatctatgcactgctgtcacagaaatataatcccaagctgcgattggagtcggagaacgaaaatctcaatctcattggcagcagtgaatctgaggaaaacaaactggaagaattttcaagctatgggaatatgcggaaatttaggtacactacaaaacaggctaagttttcccaggacaacaaagtgaagcagaaggcgttgagcctaggtgaagatctcataaacttcctcaatgaaaataacattaagaattgcttcgtggaaccactggtaggcttcatcaacaatgaggtcgtggttatcaacatgcctcttactgacgaggatctctttattgaggaactgctgaataagatccagaataccaccattaaattagactctgaaacgatcgacaagtgtgctgtgcttattaacaaatactctgccgactgctcctcagagttttga

SEQ ID NO: 9635 - DNA, 1002 bp, synthetic construct
  source 1..1002: mol_type = other DNA
atgaagctatttaacaaataccctttcctgattggcgagatcagtttcaattactacgacctggctaaaaaagaggagttaagctactttcgagtggcgaaactcctgatagagaagtgtagtgagtgcggaatcaatggagtgaatttccatgtgggcgactccgaatacctgcattgcaaatatgaagaagattccaaccagaccgaccagctcagttttgacgagtacaaggagctggcggagtactgtaagaaactcggtctggttttcattatcacccctgccaacatcgaaatcgtggacaagttgaacgacgtagtggacgtttataaaatctctagttctgatcttacgaatctgccacttattgactacattagcaacaagcacaagcccatactgttgtccactgcagcctccaacttacgcgagatcaagtctgctgtgaagtgcatcgaagacaactctaacttcaagattatcataatgcacagcgttctgagctaccccacaaagctcgaggacgccaatctgctcatgatcaaggacctatcagaacagttcaaggattatgatgtcgggtactcggactataccgtgtccgataattttatgttcatcttgaccactgcctaccagtacggcgccgtcgtgctggagaaatatttcacactggataagtcatttgagggacacgaatttgccatggacgaagaggacgcacggatcgtgcggctgagtgccaacgtcctctcgaagatcaacggctataaaaataaacaaccccttatctgcgagagcttctcaaagaggaatgtcagaaaaagcattgtcgcaaagcgcgatatcaaaagcggggagataattgacaactcaaacatcgacttcaaaagaccgggcgtggggatttctccaagcaaggtagatgatattattgggaagaatgctaacagggatatctccaagggtagcctcatagaatatgatatgctgtcctga

SEQ ID NO: 9636 - DNA, 1665 bp, synthetic construct
  source 1..1665: mol_type = other DNA
atgttcaacaataataagatcctggtcgtgattccagctaagggggtgagcaaggggattccccgcaagtatgtgcggctgctgaacaacaaaccgctcatttactacgccatcaacattgctaaatcatcccaatacgtggacgacgtcgtggtaactacagatgactctgaaattgcatcaatctctgagaagtttggcgtcagtgttatccgccgtagcaaggaactctccggagaggatatccccttggacgcggttgtgttcaatgcgatggttcaaaaggaaaaatcggcatttgatgagtacgacatcgtaattacaatgctgccgacctcccctctgcttaaaacccagaccttggataatgccatcgaaaattttgatgattttagccttgaaagcgtgatctctgtggtcgaggacaagcagttgttctggggctatgacgacgacaacaaaatatacttccccaagtacatcgagagatgcaatagaaaggacctacccagttccttccgagagaccggcgcaatcatagcgactcggcggggctttatcaacgagatttcgtgtattggggaaaatatcgacgtgatcgagttatccgatgaggaggccattacagtggatgactttaaagactggtggattgtggagacaatcctccagaggaagaggataggaattgtagtcaacgccaataacgaaataggcacgcgccgaattgacaactgtctggccttcgcaagcaaactagtttctcatgagttcctatttatcctggatgaaaagcacaagctgggacaaaacctggtggaaaaattcggcttcaacttcaagatctacaatgggcacgatgcaatctacaacatactggaggagttcgcccctcagatcataatcaatgatgtcagtgacactacggaggagtacatgtctgatcttaaggagagagggtatttcgtagctaacttcgatgacctcggcgtggggtcaaacctcgctgacgtggtatttgattcactgtacgagcatgatctgagtgacacaaacgtttatacgggacagaagttccatattctgaaggacgaattttacttccagcctcacaaagtcattacccaggacgtcgacaatatcctcattatggtggatggcaacgatccaaagcatctctcggaaaagtttctcgaagccatcctgtccactacctacgagatgaaaataaatatcatcgtcggtaggggatatgagaacattgaacagtttatcagcaactacgaatccaatcccctggtgcagatttatcagaatgtgccaaacgtcagcgattttatgttcaaagccgacatactcgtgactagcgccagtaaaatcatgtatgacgcttgcgccctcggtgtgccaaccatctgcgtgtatcaaaatgatctggaaacctcccacgttttcgccaatagcgcaaacggaatcttaaaccttggtgacgttgagtcactgacaaagcaggagtttgtgaaccagttcttggagctggtgaacaatcacgaccttaggttgaacatgcacaacaaaatgaagagcattgacctgcagcacggctacgaaaatatctgcgctgtggtcaccgaggagtatcggaagttcgccatgaacaaatga

SEQ ID NO: 9637 - DNA, 1050 bp, synthetic construct
  source 1..1050: mol_type = other DNA
atgaatatgaagagcatgagcgacaagctcttaaagaagataaacgagctttccacaccggtgaagatcatgcacgtttgcggttcccacgagcataccataatggagaatggaattagaagtctgcttccagatgaaatcgaaatcatcgccggacccgggtgtcctgtgtgtgtcgtgccctctcgggagatcgatgaggctttggaactgattgatcgcggcgttacaattaccaccttcggagacatgttgcgggtgccgggttcagaaaggtcactggcagatgcgaaggctgagggtggcgacgtgagagtagtttacggcatcaatcgggccatcgaaatctctgagaaggaggacaacgatgtggccttcatcagcgcagggttcgaaactactgcaccaaccactgcggccgaactcttggccacaccccccgagaatttctccgtcctctcatgtcaccgactgataccacctgccatcgactttctgattaacagcggggagaccagtctcaacgctctgattgagcccgggcatgtgtgcacgatcattggcactcggccgtttgagtatttcagcaaagagtttggcatccctcaggctgtcgcggggtttaatcccctggacatcctgatgagcgtatatatgatcctgcgccaaattcacaacgagacacccaagatagagaacgaatacacccgcgcagtgagagaggagggaaacacgattgcccaggaaaaaatgaaccaggtcttcgaggtgacctccagggagtggaggggatttccaaagatacccaactccatcctcgaaatcaaagacgagttctcggaatataacgcccgggaaaagtacgacattgaagtgaaagatgtgaatgaagcacctaaagggtgcatttgcggccctattctacgcggactggctcgaccagaggactgcaagctattccgtaaaacatgcaatccacttcatcctatcggcgcctgtatggtcagtaaagagggcacgtgcaacatcgcccacagatacagcaggtga

SEQ ID NO: 9638 - DNA, 705 bp, synthetic construct
  source 1..705: mol_type = other DNA
atgacaatcgaggccatcgcagttgacatcgacggcacgataacagatgagaaaaggcagatctgcatttctgcgatcgaagccctgcgcaaagcagagagcaagggaatccccaccattattgtcacaggcaatgtggtgaactatgcttatgcgaccgaggtcctcattgggtgcagcggcggccttgtagccgaaaacggtggggtggtctttaaggaaggggaaaacaacaatgctgtggagacactggttgaacgggccttcgtgacctcggctgaggagcacttgaaagacaagttaggcgacaagtttgataagcatgcctcccacgacaacatgtacagactgaccgagactgtcttctataagacgctcgatatcaaagagctggaagatgccctgaaggattttaagtacctcgacgaactggagatctacgacagcgggttcgcactccacatcaccgacaagcgggtgaacaaaggaacttcactaaaatacctgtgcgagcgaaatggaataaacatggagaacgtgatggctatcggagatagtcaaaacgacgaagatttccttaagcaggccgggtacaagatagctgtggcaaatgcggaggacaaactgaaagacatttccacctacacttgtgagaatatgttcggcgatggtgtagccgaggccattgaaaagtttgtgttgtga

SEQ ID NO: 9639 - DNA, 1314 bp, synthetic construct
  source 1..1314: mol_type = other DNA
atgatctacgagatagcccaggaggcgaaaaaggccatagagaacaattgtgacgcctatgagatctacattgatgagtcgaaatccatccagctcgactcccgaaaggaggaactgaattttgcaaaggaggagatcgaccggggcgtcggcatccgcgtcattaaggacaataaaatcgggtttgcattcacgagcaacatggataagattgctgaaacagccaaacactccattgaaaacacgaagctgaacaagactgacgagaattacgccttcgctgaggtcgaagaaatccccagtgtgaagaaagtctatgataagaaattcaacgaactagaccttgatgaatccattgaatttctgaagaacaccatcgacaccaccatcgaccaaggctgcgacatcactgggtccggctttagcgccagtgagggaaagtcccttattctcaactcgaacggggtgtccattgaggatgagggtaccggctttagtatcggacttagcgtaaatatacagaaagatggaaaaatcgccacagcgtacaacagccagagctcaaggttctttgacttggatggggagaaactggctatcgaagtgtgcaatcttgctaaaagtagcctggatacaaaacccattgagacgaacaactatgacgtggtgctagactactacgctgcgaccggtctgctgcagacattcatgaatgcattcaacggtgaaaatgtgatgcggggaaggtctatcctcaaggataagatcaacttccagatcgctaacccgaatttgagcataattgacaacccactcttagaaaagggcatgtatacctcaaagtgcgacggggagggcatcgtaagtcagaaaactgacttgatcaaggacggcattctcaattcattcatctatgacatttacaccgccaacaagagcggcgtgaagaccacatctaacggtctccgcgggagctacctgacaacccctatgatttcccccaccaacctcgagttcaagtttagcgatatgaaggacctgtcagagattaaaaatggtgtgttaactacgagcgttctgggggcccatactgccaatccaatctcgggagatttctcagtggaggcaagtaacgcattcaagatagaaaatggggagctgagcgagcccatcaataaagccatgatcagcggcaacatatttgaaatcatggagaaagtcgaaggattgcaatccgagataaagcagtacggcccattcatcattcctaagctgctggtgcacgatctgagagttgttggacagaaccaatga

SEQ ID NO: 9640 - DNA, 252 bp, synthetic construct
  source 1..252: mol_type = other DNA
atgcccaagaatgaggagttcgacctggacaaagagatcgaacggatttcccgcaaaacaaacattaatatgcgaaatagtgagttctccttcgagaaccagatcagaaagctagataaggaaattgataagatcatggaagacaaactcaaagagtttgacgataacaagaagctgacgtcagattactttagcatcgactataacgaatctaccataagccggtacagggagaaactgaagaagatctga

SEQ ID NO: 9641 - DNA, 462 bp, synthetic construct
  source 1..462: mol_type = other DNA
atggagagtgaggtgaaggtcatcccagaacagaagttggccgtgatcaattgtaaaactcccatcaccgatctagagattttcctgtccatgctgatggggtgggtggacgcggaagagatcgagacagccggcgagccgttcattgtctatttctcgcctaggcatcaggtcaataagggggacgcagtatttgacgtcagcatcccaattaaggaggacgctaacgaaacagatcgcatccgggttgtggacatgatcagcaacaaagtgctgtccggtattcactacggctctgcagacagcataatggaaacctatgagaaactcgtggacatcgcccaggaaaaccactacgatattatcggatcacccaaagaagtgcttataaagaacgttcacaattgcgatgatgagaaggagtacataacggagattcaactccccatcatcgaaatgtga

SEQ ID NO: 9642 - DNA, 1224 bp, synthetic construct
  source 1..1224: mol_type = other DNA
atggggaccgagtttctgaagatcaaggagtgcgatgaggccaccgagattattcagaaactgttcgacgagaagctcaatcaacagagtgaagagatactggttacagagagctacggaagaattttattcgaggacgtttactcaaagatggattttcccccctttgataaggctctgaaggatggatttgcaatccttgcggaagacagtttcggagcctccgaagaaagccctaagacattggacgtaatcgatttcttagaggcaggtgcaaccactgacaaaaaggtggagaaaggcaaatgcattgagattagtaccggggcagccatgccggaaggcgccgagtctgttgtaatggtggagtatgcggaaaagtccgacggtaaagtgaatctcctgaccactgccacacctacacaggatgtggcccggaagggctccgacatcgaggagggtaagctgatcctgaaaaagggcgatttcctgaaccccgggaagatcggcgtcctgcttagccaggggttcgagaccatcgaggtgtacaaaaagcctatcctcggagtgatctcgagcggaaacgaaatctcccttcagggcgaaggattgacctacgggaaaatctacgacgtgaacggaggcatgattaaaaacgccgctatctcctgcggcgccgacgcccactttctcggcatcatgagggataactatgacgaagtgaaacacaaaataacggacgctctaaaagaggcggacattataatttgttcggggggcacttctgccgggctcggagacgtcctgaacagcgtgctcgaggaactgggcgaagtgtacattcacgggatctcagtgcaacccggtaagccaaccatcatcggcgtcatcgaggataagctagtcattgggctgcccggcaatccagtgagtgctctgatgatattcaatgcattcattgcagaaccgctgacaaagctggctggaattgataaggacttcgagctggacacggtgaaaggcaagatgactcggcgcatccattctcctgttggacgaatgcagtaccagctcgtcaaggtcgatggcaaggacatccatccaatatttaaagactccggtgccatattttcacttagcacggctgacgggtatgtcaaggtcccaaagagcgtggaattgctcgatgagggtgaagaagtagaggtgtatttgttcaactga

SEQ ID NO: 9643 - DNA, 306 bp, synthetic construct
  source 1..306: mol_type = other DNA
ctgagcaagccgaaccagaatcagcagcaggaatatagacgcgtgaggacgcctaagaaaggtgagattcccggggtcgtcgagcaaattatgggccacggaaagctaaaggttcggtgcgcagatggcaacatgcgaatgaccagaatccccggaaagatgaaaaaacgtatctggatacgggagggggacgtgatcctggtaaagccatgggatttccagtccgacgaaaaagccgacgtgatctggaggtacaccaaaacagaaagcaactggctggagcgcaagggctacctcaagatgtga

SEQ ID NO: 9644 - DNA, 771 bp, synthetic construct
  source 1..771: mol_type = other DNA
atggactcgaagatagccaaggcagatgccaagcatgaaaagctacattcccagaagcggaagaaggatagttcagacaggaaagtggggaacgagattttcgacaagataactttggaaacactatacaagcttgcgaaccaggggcacatcgatatcctgaacggtgctatcagcaccggaaaagaagccaacgtactgacaggcattactgacgatggcaaatttatcgcagtcaaggtgtatagaattgctacgagcgactttaaaaagatggattattacctcaaaggggacccacgatttaacctgaaaaccaaaaacaagagaaaaattatttattcatgggtcacaaaggagttcaaaaatctgacccgcctggaaagcgccggcgtgaaggtccctcacccaatcaccagtgcgaacaatgtcttgcttatcgaatttatcggagatgagaatggaaatcctgctcagcccgttaagaaccaaccacccaaaaatagcgaggagttcttcaagaagttactcataaatctcaagctgttcgtgaacgaggccaagctcgtgcacggcgacttgtccaattacaacatcctgaacaaagacgaggagcccgtaatcatcgacgtcagccagtctgtggttcttgataatccgatttcccgcgagctgctggagagggacattaacaccctcgtgcgtgaatacacgaaactgggtgtgaagactagcttcgaggagatctgggaatacgtgaacccccggtga

SEQ ID NO: 9645 - DNA, 249 bp, synthetic construct
  source 1..249: mol_type = other DNA
atggaaaccccaccctgtaagagcaagatcaaccgcatcccgaagccacctagcgccaagatctgcgtcaaacatagtcaaaagaaaaaacacatgacgggcatgaccaaattttaccggtcctacgacttcgagattcagaaactgcctatgatcaatgaaaacacaatgcagaagccccagcagatctatttcaaggacctgcccgacaaggagattataaaggaggatgtgattctctttttctga

SEQ ID NO: 9646 - DNA, 1317 bp, synthetic construct
  source 1..1317: mol_type = other DNA
atgggcgaaaagtataaaaaggtgattaacatgaaaaagtatctgcccagatacactgaccaggaactgaaagaatctctagaatacatgggcgctgtgctcatcactggtccgaagtggtgtggtaagaccaccacagccaaacagcaatgcaagagcctcaaggagctacagcaccccgttcatggaaaatcttacctgaagcttgccgataccaaccccatagagcttctgaagggcgagaagcccatgctgattgacgagtggcagatggcaccagaactgtgggggactgtcagatatctggtagacgaatcagacgaggacggactgtatatcctgaccggatcgaccattgttgatgaaagcaagattgtgcactcgggcgccggccggataaagaggattgtgatgcgcccaatgagtctgtatgaaagtggtgaatccacaggtgagatcagcctgatcgacttgttcgataatgacgacttaaacattgacggagtaacgtccaacctgacaatccctgatttgatctttgccgcatgccgggggggctggcccgaaagcctaaacaagaagaccaaaaagcagcaattggcaattgtatcaaattacatcgatatcatttgcaatagcgatgtgagcgaggtggatggggtgaagcgcagtcctcagcgggttaaaacgattctcaaatcctacgccaggaacatatctacactggcaactaagaaaaccctcatgaaggatataaagaccgagtacgctgatatctccctgccgacattcaattcctatattgatgcgcttgagaggttatatgtcatccagaacatccctgcttggtcacccaacatcagatccgccaacaccatccgaaaatcctacaaaaaagagtttattgacccaagcatcgccgtggccagcctgaacctcactcctgagaagctgttgaaagacttcgagaccttcggattcatatttgagaatctctgcatacgtgacctgctggtgtactcaagtagcgtcaacgggaaggtcctgtactacaatgacgacagcgggcttgaggcggactgtgtcatttatctcaatgacggccgctacgctttgatcgagtttaaattgggcaaccgagaaatcgataatggagctggcaatttacttaaactcaaggatctcatcaagaaaagcgtcgagaacaagaagattgacctggaagagccaagtttcctcgcggtgatcacggggggggagctggcctacacaagggccgacggcgtgaaggtgatcccaatcggatgtcttcggtga

SEQ ID NO: 9647 - DNA, 939 bp, synthetic construct
  source 1..939: mol_type = other DNA
atgtttaaatttgataaggaacaagaggtgtttgacttcgccggcgtcaagatggggggacagcccggagagtaccccactgtgctcgcaggaaccattttctacgggggccacaacatactgaatgatgaactgaccggagacttcgacaaggacaaggctgaaacattggtgaacgatatggcatccatctctgacgtaacaggcaacccgtacatcgtccaggtgttcggccaaaccgtggaagccctgccaaagtacatcgaatacatcggggaaatctgtgatgctccattccttatagatagcacaagcggcgatgcacgcgtggcgggtgctcagtacgccgacgaagttggcctaaccgagagggcaatctataacagcatcaacatggcagccgacaagtcggagctggatgctctcgcgtcaacggacattagtgcctccattatcctgggcttcaacccaatgaatgcgaccgttgaagggaaaatgaacatgtgggagaatggagacgatggggcttacgagaagggtttgctcgaggtcgcagcagactgcggtattgacaaatttatgatggatacggccgtgacgcctttaggacagggggccggtattgctgctagaacctcctttgccgagaaggcgaagtggggatatccggtgggctcagggatacacaacgtgcccagcgcctgggactggctgcgggactataaaaaagaggggaataaaactgccttcacagtgtgcgatataggcgctaacatcgtgcaggtaatgtgcggcggagacttcgttctctttggccctatcgagaatgccaaaatcgctttccccgccgtcgcccagactgacatgttcattagtgaggccgccaagcccctgggcaccgagcctgtcgattatcatccaatgaataagcttctgtga

SEQ ID NO: 9648 - DNA, 621 bp, synthetic construct
  source 1..621: mol_type = other DNA
atgccggaaacagattacttaaaaataccacagaacaggataggggccctcattggcagcaacggaggcgttaaaaagtccatcgagaaagcgactggaaccatcctggacatcgatagtgacgagggcactgtgtacatcacccctggtgaaaatatggaggacccattgggagtgtggaacgcgaatcacattgtcaaggccgtggcccggggcttcaaccccgaggtggcacttaaactcgtctcggacgactattatctggaggtaattagcctgcccctctacatcggaaaatccaagaaagccctggcaagacataagggtcgaatcatcggaaaggacgggaagacacgggagatcatcatggaaatggctgaagtgaacatggctatctacggcaagacggttagcctgattggggagatggacaatattatggtggctaaggaagccattgagatgattttgaaggggtctcgccacaagtcagtgtatgggttcctggaacacaagaaggaggacctgaagatgaaggagttcaaagatcttgtcggcatcgaagatgataaaatagagtttaaggatggcatcgaatttgacgagaaaaccctacagtga

SEQ ID NO: 9649 - DNA, 1704 bp, synthetic construct
  source 1..1704: mol_type = other DNA
ctccaggagcaagatgtgggcaccgattggcggaatgattttaagaacctgactccatccgagttctttaggaaaaacaagcagatgttaggctttacggggaagattcggtccctgaccattgtgttccacgagttgattaccaacagcttcgacgccgccgaggaagctggaatactcccggagatcgatatcgagctcaagcgcgtggaaaaggagcattacatactcaaactcaaggataatgggccgggcatccctgaagactatgtaatgcgcgtgtactgtagtatgtttgccggctcgaagttcaggaacatacagtcgcgagggcagcagggactggggtgtagtgggtgcgtgctcctgagccagatgaccaccggtaagcccgcgcgggtcataagctgctataaagaaaatggcgacatcaagggggtgaagatgaagttccaaatggacgtcaagaacaaccggggaattttgatggaaagggaagactatcccgcagaaagcacaggcgtgtgcatcgagctacagttcaaagaggtgtcctattctctggccgagcagggggcttttgagtacatcaggagaaccatgattggaaacccacatgccaaaatcacattcagagacccaagcggccacaaatacatattcaaacgagcggccgacattgtcccaatccttcccaaagaggtcctgcctcaccctaagggtgtcagcgctgacgacttgatgaccatggcacaaaatacagacagtaggcgttacaagagcatgctcacctcctcactgagccgcatgtccaataaaagagtggacgagatctccgaacttacgggaatcgacatgaacaagcggccaaaagacctgacattccctgaagccgagactattgtacattgctttaagaagatgaagttcatggcccctcccaccgatggcctgatacctatcggaagcgaacagatcgaaaaggggatgaagcagatccttaagcccgagtttgtcacgacaattaccagaaaacctgtgacataccaaggcggtgtttcattcattatcgaggccggtctggcatacggcggggactccggccgcgtcgtaaaagaacaacgaaaatctgagattatgagattcgcaaaccgcgttccactgacttttgatgcaggcagctgtgctattacggaagccctgaaaagtattgattggaaacggtacggcttgaaggacttagataatacgcccctgaccttgtttgtaaatatcatttcaacacaggtgccgtatctctcaactggtaaacagagcgtttctcccgagcccgaaatcgtgcacgagatccgccagtccactatgaagctagcccggaaacttcagaagcacctcagagctaagaaggctgctaaggaaaaggagaaacgttcaaaagtcttcgaggattacatgcccgtgatcatcgaagaagctgccaagctgggcgagaccggagtgccagaatatcaggaggtgctggcaaaggtgactaagagggccctggccgagctgctgggggaaaaagtcgaggaggaagaggaggaagaggagcttgacgcgatcatcatggaagaagttgatgagcgaggatacgcggttgatggaaacagtacactagatagcttcgaggaggatgacgtggacgacgagtttgaggactga

SEQ ID NO: 9650 - DNA, 1095 bp, synthetic construct
  source 1..1095: mol_type = other DNA
atgactgaaataaaagaaaaccagaaggcccatagagagaagaggaaggaatacacctacaataagctgaaaggactgggtcaagaaatcattgaggatattgaaaagcagaaggtgcctagcgtgaaggtgccctctcgcggtactggcaacatcgtgtacgataatgctaaacgctactatgtgctcggggaccgctacggccgtcgaagcctggggaacgtcaagcagattcggaagctaggccagatggtgtatgtggcgaacttctgcaaagatttagtggcccgggagaagaccgccacaatcagggaaatgtactatgtttcagaggggtggggcataagttttaaaacccagcaggagtccaacatcgtgggagaggatttggaagtaacactgggaaccacccgggaggacctcgggcttatgcccgaagaggacggggcttcggtctatggcgacatcacactcctagatgatggcgttgaaatcaatgccgcaaaagccggaaagtccggttacacaatttcaccaacgatagaccaggtcgaatttcttgactgcggtgtggagagggttattgccgtcgagaccatgggaatgttccacaggatggtacaggagaatgctaacaagagattcaacactctgatcgttggactgaaaggccaggctgcccgggctacaagacgatttatcaagagagtcaacgaggagataggcttgccagtgtacatctgtaacgacggagacccctggggcttccacattgcccaggtcattatctccggcagtgcgaagctggcgcatgtgaaccacgacctggcaacgcctgacgccaagtttatgggcgtcaccgcaagcgacatcatcaattatgatctgccaaccgataaactcaaagacgtggatgtaatgcgcctcaaagagctctctaaggacccccggtataagagcgacttctggcaaactgagatcaagaaaatgcttaaaattgggaagaaggcagaacagcaaagcttctccaaatatgggctggagtacgtcgtggatacgtacttcccgcagaagctggaggagttggaaaattga

SEQ ID NO: 9651 - DNA, 273 bp, synthetic construct
  source 1..273: mol_type = other DNA
atgaagcagtgcatggataccgaaaacctgcacagacgcctcaagaagatcatcgggcagctgaatgccattgaccggatgatcgaggaggacattccctgtgagcagatactcatgcaggtgaacgccagcaagagtgcactgcataaagtgggacacatcatcgtcgaaggccatttggaacactgcgtcaaacaagcgatggaggaagatgacgtagatgaggctcttgtggacatttcatccatactagagtattacagcaggctgtga

SEQ ID NO: 9652 - DNA, 1869 bp, synthetic construct
  source 1..1869: mol_type = other DNA
atgaatctcaagtttaaaaatgaggagaagctcgagatcatctttatcatcgtgtcatccatcagccttgttctggggtttctcctgtctatcgactacctgtcttggatctcaatcataatttgtgggattcccattttcaaggagtgcatcgaaggactgatcacagagttcgatattaaagcggatttgctcgtgagcatcgcgatcattgcatccattattatcggtgaaatatttgctgccggggagatcgcgactataatggcgattggcggtttcttggaggagtataccgtagccaaggcccaaaaccagatcaaggagctcgctaagatgacgcccaagaccgccaccaggattaaaaatggcaccgaagaaaaggtcccaattgaggaggttaagatcggagacattctgaagattcttcccggtgagagcataccaaacgacggcatcataatcaatggagagacatcaatcaaccaagctacgctgaccggagaatcgataccggtggataaaacccggaatgacgaagtatacagcgggactattaacctgtacggctcatttacaatgaaaaccactaagataagtgaggacagttcccttcagaaactcattaagcttgtggaatccagcaagccggagaacgccaacattgtgcgtgccgctgacaaatgggcaaccatgattgtggtcatcgcctttacagccgccatactcacctacctgttcacattcgaaataacccgctccgtgacaatcctcgtggtattctgcccttgtgcactggtgctggccactccaactgcactcatggccgccgtcagtaatttaactaagtacggcatcctagtcaagaacggagagtctcttgaagaattagcccacatcgacgaagtcatctttgacaaaaccggcaccctgacttacggcaacccaacggtcataagggttatctccgaaaacccccaggagatgatgtatctggccgcatcacttgagtctaaatctgagcaccctctagcgaaagctatcgtgaaatattataataacaacgacttagccgctgtgaatgagtttaagatccatattggtaaaggaattacggggtatatcaacggggtgcagataattgctgggaacaagaagttcctagagtctaagaacatccctctaggttccaatgaaaatagcagtaatggcgaaatcgaaatttttgtggccaaggggaataaaatcatcggcaagatcttcctggcagataccatccgcagtaatgctaaggcgacaattaaaaacctcaagaagctgaggattaaaacaacattgctgacaggcgataatgaaaacactgccaagagcattgcaaatcaggtgcgaatccataacatcaaattcaattgcctgcctgaagacaagatccagtacatcaaagacgagcagatccggaaccacagagttgccatgattggagacgggatcaatgatgctccatcactccggaaatccaacgttggaatctccatggggaacatcggcagcgatctgtcgatcgagagctccaacatcacgctgatcaaggacaacatcgagaatattccccacctgattgaggtctcgaagaaaaccataaagacgatcaacataagcatcggcttcgcattgactctgaatataattgccatggcactcgctattctgggaatcttgaaccccattgagggcgccctgatacacaacatcggcagcgtgattgtaatcatttactctagcatcttggtgaactacaagagtagtaaaattgattatagaacccaacagttcgatgtcaacaaggctctgaacattaccatgttctga

SEQ ID NO: 9653 - DNA, 204 bp, synthetic construct
  source 1..204: mol_type = other DNA
atggccgagaaggagatcaaggtggtgggtatgcactgcagttcctgcgtcaacgccgttgagctatgtctgaaagatgtggatgggatcgacgatgctaaggcagacctggactcaggaattacaaccctcacgctgagcggcaacgtgagcgacgaagacataaatgaagccgtcaaagaagcgggcttcgaggtagagtga

SEQ ID NO: 9654 - DNA, 1017 bp, synthetic construct
  source 1..1017: mol_type = other DNA
atgaagaccgtagcaattaatggatatggaaccatcgggaaacgagtggctgatgcggtcgctgcgcaagacgacatgaaggtgattggtgtcagtaagacccgacccaactatgaagccagaaccgcagtggaggaaaagggctaccctctgtacatcggaatcccagaacgcgaacagatgtttaaagatgctgagatcgaaatatccgggactgttgaagatatgatccaggaagctgatatagtcgtggactgtacgcccgggacgatcggaccccagaacctggagatgtacaagaaggccggggtgaaagcgatctatcaggggggcgaggaccatgatctcactgggctgtcattcaatgccatgagtaattatgacgagagctacggtgctgactacacaagggtcgtatcctgcaacaccaccggcctgacccgtaccttgagcacaatcgatcccattgcaaatattaagaaagttagagccgtcatggtacgcagaggctctgaccccagcgagattaagaagggcccgatcaatgcaattgtgccaaatcctccaaaagtaccttcgcaccacggccccgatgtcaagacggtgatgaaggacatcgacgtgacaacaatggccttgctcgtgcctaccacactgatgcaccagcacaacatcatggtggagattaacaacgaagtggagacagaggacatcgttgaaagcctcgagaagcggtctagggtcatggtggtgtccgccgaggatggtctcggctctactgccgagctaatggagtacgccaaagagcttggacgcaaccggaatgacctgtacgaaatcccagtttggagggagtcaataaacgtggtcggcaatgagttattctatatgcaagccgttcatcaggaaagcgacgtggtgccggagaacattgatgctatccgggcccttctggaaatggagagtgacaacgagaaatccattgcaaagactaacaaagccatgggaatactgtga

SEQ ID NO: 9655 - DNA, 834 bp, synthetic construct
  source 1..834: mol_type = other DNA
atgaagcagaaggtgattttcgggcctgcaggaagccccgtagactacaaaggagccgcatacaaagctccaaagtatattagcgaggagggtctggacagctacgaataccaaagcccctatggagtccgcatcggcgaatccagtgccagtaccttaaaagaggaatccgaaaagcacgatgtgctgatcagtatgcatgccccctactatattaacctatgtgccaaagaggaaagcaagcttgacaaaagcatcgaccacctgatagctgccgcacgtgcgggcgagtggatgggcgcctaccggctggtcttccacccgggcgcttacctcaacagaaaacctgagaaggccatggaaatatcccgaaataccatcaatcggctgtttgaggagctcgagtcggaaggaatcgaagagttcacctttgcgcctgagaccacaggtaaacgcacgcagctgggaaatataagggaggtggttgagctgtgcgctagcttcgaccattttgaaccaacaatcgacttcgcccacatccacgcaaggggccgggggttcttgaacaagaaggaggattataattgcatcttttcaacgattgagaaccagctaaacattgacatcctccactgccatttcacaaccattgaatacggcaaggggggggagatcaagcaccatactttggatgaaaacgactacgggccaaacatagacgatctgctctccaatctgatcgataacggctggaatgcgaacatcatctgtgagactccccttagagatattgactcactcaagatgaagaaaaagtatgaagagatgatttga

SEQ ID NO: 9656 - DNA, 510 bp, synthetic construct
  source 1..510: mol_type = other DNA
atgactattaacgacaaccataatcacttctgcatttactgcggcgccaaactcgatttcgggcaacacttttgcaccaaatgtggaaaggaagtggtgcacgcggaacccacgtacgagatcgtgtcccgctactacgacctgctatatgacatcgagcaggaatatgatgctaaacaggaaagggccaaggagctggtcaacaagctcttcgatccagcccacatgagctacaacaagtttctcagctccatcaataaatcgaacgggctgttcaacaatcagttggacgtggcaaagcggatgatcgaagtctacgacggtaccaaggactttatcgagcatgagattgacaacaaaatcagaaccctgcagacattcgttgataagatgaatgatctgatcgacgagatggtgattcacctgagttcaaacaagcaggatacaggcgatataaataacctttttgaggacatggacgacttaatagacagcgtaaaggattattga

SEQ ID NO: 9657 - DNA, 1068 bp, synthetic construct
  source 1..1068: mol_type = other DNA
atgagcttccggacccgaagaatcttaatcatgacgcctttttatatgatcttccagttcttcctgctaaaatatctgctgttgctgtttggcgggcttgatgacggctacctcatcatcattgcaatcatcgtcgggctgctccactgcatgccaatgttttttgagagcaagaagagcactgtggctgggcgcttcctgacaacaattggcggtgtctggatgtggatgtcgctaatgttcctgttcgacctcatgttcatctacctcattaagatgttcgtaatactgccttttgagataatcgtggacctggttctgatcgtgccgttcctcggcatctataacttctacaagtcccataaactcgtgattaacgagaaaatactggagctgaataacctgtcacgcgatatcaacattgtgcacctgtctgacgtgcacttcggaagcgtccggcataaaaagattatcaatcttctcgtcaataagctgaaggaacttgaagacacatgtgagcttgcgattatttctggtgacctggcggatgggtcttccgctgttggcactgatgacttcttggccttcaaggacgtggatatgcctatcatcttcacccccggaaaccacgatttctacccgggtatcgacaacgtgataaacgcctgcaaaaacgccggaattattgtgctggataacgaaaagaaggagtttggggacctcagtatcttcgggctgacgtttagctttgaagataggtgcgtgcccaaaattgacgaaagttggataaatcccaatctaatcaatattatcaactatcatgtgccctactactgggacgagtttagtaagctcggctttgacatccaactttccggccacacacacggcggacagttttatccagccatttggtttgccaacatactgttcaagtacaacaagggactctttaaaaataatttgggaaaatacttgcatgtcaccactggtgtagggtcaatggataccccaatgaggtggggcaccgactccgagatcgttatcttaaagttgaagaaagcatga

SEQ ID NO: 9658 - DNA, 1125 bp, synthetic construct
  source 1..1125: mol_type = other DNA
ttgaagaatgataacaagaaagcagaaatcaagacaactaaccagaagcagaaattgaagaaagccgagagtaaggagtgcgctgaatgtgtcatcctgaagcccgtgggctatccattcgaatttaatctcatggacgaacacattgagattaccaacaagaagctatttgaagagtatgctcgggagcagtggctgggcctggtggtgaaagagaactcccacctgttcgatcagaagataattcctgattatggtttcgaggtcataaaggccaagccgaataacagcataatctctgaaacaacgcgcatccaactaatcaccagcgatctcgagaacaagaatgacaagctcaccttcaaatcaaacatatcgatttcggatatcgtcggccaaacgaatgcaaaaaataaagtgaaggtgatcatgaaatacttagagcacccgggcaaattcggaccctgggcacctaagaacattctgttttacggcctgccagggaccgggaagaccatgctcgtgaaagcgctggcgaacgagctggaagttcccttgtacctcattaaggccacatcactgatcggcgaccacgtaggggatggtgcctctaaaatccatgatctcttcaagaaggctagtgagaacagcccatccatcatctttatcgacgaaatggacgcagttgctctgcacaggtcattccagtccctgagaggagacgtgtcagagatcgtaaactcctttctgactgaaatggacgggataagcgagaacgagcatgtcatcaccattggggccactaacagccctaatagccttgattacgcgatcaggagtcgattcgaggaggaaattgaatttaagcttcccgacgacgaagagcgcctcacaatcctgaaaaataacttaaagagcatgcccctggactacgagctcgacttggaaaaaattgtgaaacttacgaagggactttccggacgggacataaaggagaaaattctgaaaaccgccctgcataacgccatcgccaacgactccgacagcatcacaatgaaaaatattgattacagcatcgagtctagtaagatcaaaaataaggatattaagggcatgttcgagtga

SEQ ID NO: 9659 - DNA, 1191 bp, synthetic construct
  source 1..1191: mol_type = other DNA
ttgatcctaaacttacgggtggatcataagattgcggacatccagtccatggaggtgattgcaaaagacatcgacgacctattcgcagagctgcaagaaaaatacagcattggggagtacatagagatcagtacatgcaatcgaaaagagtactacattcataacaacaatatccccgaagatgatgagctgctctcacacgaaaacgtgagcattgtaattgactacggccagtccgccgtcatgcacctgcttcgtttgacgtcgggcctggagagcatgattattggagaggaccagatcctcggccaggtgaaggatgccaaaaacaatgctatcaagaaccaccactgcgggaaagtgctcgacacaatcttcaccaaggctatccacgtcggtcaagtagtgagaaataagacacgcatcaacaagggatctgtgtccattggatcagcagccatcgacttggctgagaaacacataggatctctggtggacaaaagcgttctggtcatcggggcaggaaaaatggggaagctggttgctaaggccctcgctgaaaaggacctcaaggctatcttcgtggccaataggacttattatgtcgcggtgaatctcgcggaggacttgggcggggaagccatactgttcaacgacctggagaaatacctcactaccgccgacttggtgattagtgcaacaagcgccccgcatccagtcatcaccaaggaccggctcctgaaatgcggtaggaactacgaaaccttaatgatggtggacatcgctaaccctcgcgatatctctgaagacgtgtgtgagctaggcgtcaaaagcttcaacattgatgatctcagagagatcgccgagatcaatacgaaccttagacgcaaggaatttgtcgaagcggaatcgatcatcaatgaagagtttatcctgctgaaagagtcctttaagataatggaatttgataagctgcttggcaatctgagggcatcaatggaggacatacggcagcgagagactcagaaagccaacgtgaagctggctgtcgatggcagtgtaaagatcctggataatctgaccaacagcattgttaacaaaatattctatgatatttccaagaaggttaagaaggccgccaaggatgagaatgaggacatacttgccgcctgtgaatatattttcaactga

SEQ ID NO: 9660 - DNA, 621 bp, synthetic construct
  source 1..621: mol_type = other DNA
atggactggacctcgctttacttaaagacattcgattttaacgtgttcattcttggtacgggcgaggttgcaactcggcgagccaataagtttctggaccacggggcgaatgtcaagctcgtgggagatagtctgcctaaggaattgaaatacaaaggagccagcctctgcagcgtctccgatgtcgacgaccttatcgattggtccgacctggtggtgatagccagcggggacagggagctgtctgattacgtgagcggcattgccaagaataaactgattaaccgtgcagatttcccacaggaggggaacgtaatcgtgccgacaagttttaacatcggtgaaatcgagatttcaatcttcaccggaggcaaatcccccctgatggctcgccaactgagaaagaagatacagtcaatcatcaccgaggaagatatcctggagatcgaactgcaggactatgctcgcaaaaacctgaagaaactagtggaaaatcagaaggacagaaaaaagtacctctatgaaatcttcgaggacgagaaggttaatgtcttgattaagaaccggaagattgacgaggccaaactctatattgacaacctaataaggggcctcatctga

SEQ ID NO: 9661 - DNA, 483 bp, synthetic construct
  source 1..483: mol_type = other DNA
atgacctgggaggacgcgccatcacacatctgccgaggaggtgacatcagggggctcgctttctgttgtccccccgtgaagccatgccctatcctgaatgcactccaggaagtcaacttgactccgaaggagtacattgaaattaagacgcagttcgccaaagagacccgcctcggcgagggggccggaacctgtttcggcagcctggtatggtgctgcaagccctccaagccctgccctctgagggacatgactcttaaaaatatgggcatgagccacgatgagtatctggacttgaagaaagagttatccgaacggctcgtcggggttaagaaaccagaccctgatgagaaggccgaggcactggccgaaacatttaacgtgacaaaactggaagctatgaacatactaaacgaatgtaacgacgatctgcgggcggctgtgaaggtgcttcatgccagatctctggagaatagtgattga

SEQ ID NO: 9662 - DNA, 687 bp, synthetic construct
  source 1..687: mol_type = other DNA
atgaaggagaagctgatcgtggaagacataaccatcacactcgagcggaaaaatatcaagaacatgtaccttcgagtcctccctcccaaaggcgatgtgaagctgagcgtccccttattcttgccaaacaacgaggtgattatgtttatcaagtcacgcaagaattggattctgaagaaacaagagttcattctgaacaacaacatccagcctcccttaaagttcattagcggtgaaaagcatcagctgtggggcagagaatacacgctccaactaattaagaatgacaacatagagcacgtgctaatcgatgaggacaccagcattatgtacttgccactcccgaagaagagtacaattaaggcgcgcgaggagatcctgatcgatttttatcggaaagagcttcagaacgccatccctcaggtgcttgaaaaatgctccctcatcgtcgggcagaaaccatccgaggtgaaagttaggaaaatgaaaaattggggaaattgcaggcaggatagacgtataactctgaatctgaacctggcaaagaaagaccccaagtgcctcgaatatgtaatgatccacgaactgtgtcatctgatcgagtttaaccacggggagaagttcaagaaactgatagacaagttctgtccggactggaagaaaatcaagaaagaattgaatgaatga

SEQ ID NO: 9663 - DNA, 1602 bp, synthetic construct
  source 1..1602: mol_type = other DNA
atggatttcataacactgaaaaacattacgaaaacttttgacggggtcgacgtgcttaagaatataaatctgaaaattaacgagggggagaccctggggattctgggccgcagtggatcaggaaagagcgttttaataaatatgcttcgaggcacatcagactacaaacccgatgccggtcagatactagtgaatgtggccgtgtgtcccgattgcttagccgtcgactcaccatctcacgtgggggaaaagtgctcctgtggcgcgactctcgaggcgaaggaggtagatttctttaacagcgagcgcaaactgttcgctagcattaaaagacgcatttccatcatgctgcagcggaacttcgccctgtatgatgaggaaacggtcatcgaaaacgtgatgagggcgatgcccgagggcaaagattacgacgagaagatctacgaggcactggagctgctggagatggtgcaaatgaatcacaggatcacgcacatcgctcgggatctgagcggaggggaaaaacagcgcgtcgtgctggcccgccagctcgccaagagcccaatgatgtttctcgccgatgaacctacaggaaccctcgatcctcaaactgccatcaagctgcataacaccctgaaggaaggcgtgaaggacaagggaatcaccatgctgatcacctctcactggcccgaggtaatgattgaactcgcagactccgtgatctggctggaggagggtcaaatcaaagaggagggcgagccggagaaagtggtcaacgagtttgtcgctacaatccctattcctgagaaaccagagatccccgaatttggagaaccagaggttgttcttgaagacgttaagaagcactactactccattgaacggggggtggtgaaggcagtcgacggggtgagtttaaacatcaacaaggaggagatcttcggcatagtgggcctcagcggttccggaaaaaccacgacaacaagaatgctgatgggactaactgaaccaagctccggcaacatacagattaagctcggcgatgaatggatcgacatgacgaaggtgggcccccttaaccgggggcggatcatgccctatatcgggctgttgcatcaggagtattcgctgtatcctcataggaccgtgctcggcaacttgaccgatgcaatcagtttgaatctccccgccgagttcggtaagatcaaggctatccatgccctcaccactgtagggttcgccgacgacgtcgccgcaagcatccttgataagtaccccgaccagctgagtgtaggtgaaaagcacagggttgcgttggctcaggttctgattaaggagcctaatttgattgtgttggatgagccgacaggtaccatggacccaattacccgtgtcattgtctcggactcaattctaaaggcacgaaccgagctagaacagacattcatcatcatctctcacgacatggattttgtgctggatgtctgcgaccgagctgctctcatgagaggaggcaaacttctggacattggcactccggaagaaatagtggacaaactcactgccgacgaaaaagaggacatgctgaaggaaaatagatga

SEQ ID NO: 9664 - DNA, 732 bp, synthetic construct
  source 1..732: mol_type = other DNA
atgctgaaggtagttgccccgatggctggtataactaatgctgcctttctgaataaagtgatcccatatggattcaatgtcgctaccttgggcggatactcccttgactccccaaccatcgaggccagtaagaaaattatccagcgaggcaggaaggaatttgattttcctctcgatgtgatcttcaatcatatcgaaaacgaggtggatttaattaaaaagtaccacaagaacgtaaaagtgtcggcgaacgtcagagcatcaaacccccaacccataatccacgttggcaatattaaaaagctagacattgtcgaaattaactgccattgccgccagaaagaaattctcgatgttgggtgtggacaggaaatgctgaaacgggatgatctgaagaagttcatctcccagatcgtggacaatgtggacagtgaggtgagcgtgaagattagggctaacgtggacgggatcgacacactggagatagccaacatcatcgcagatgccggcgcagactacttgcacgtggacgcgatgaagaagggggtgtttgaggccgactgggagctcctgcgcagcatttgcaacgatgtggatatcaacgtcattggaaacaattctgtaaactctgagataaatgttagaaagatgatcggcacgggtgtcgacgggttcagcatagcccggtcagtcatcagcggcaacctggagttcgacatcagcgacttctga

SEQ ID NO: 9665 - DNA, 780 bp, synthetic construct
  source 1..780: mol_type = other DNA
atggaaagagggtattcaatgatacaaatgacattaatacagatcgataattacgggccttggaccgtgaccccccgtccccggactgaatctgacctgcagattcttcaggcacgcctcttcgccgacctgaacagttattttggatcgaaaaaaggcctggtgttcttcacccgattcgacaacctgctcgccatcagcaacggtatagatgaggaggaccatctccgcatccagaggtccattcggaataaatacccaattactgtatccatgggggtgggcgctgccgagactccacatgaagctcagaagctcgccacgattgcgctccagaaggcaggctccgcccaatctggcgaaaggaaagagattctggccatcgatagcttggtggacgaggagaacagctttgtccaggcagcgcacatcgacatcaacagcgtcacagagacgttcacagatattgagagtgcatttgacacaagctttagtgtgaacaaggctcagcactacctgatgaccaagctgattaagaagggctcattgctattctttatcggtggggacaatttcatggctccgtgcaatggactttccgagaaggagatagaaaatctaatgatcgaaatcgatgaagagatcgggattaagctgaaagccggcatcggaagagcgaaaaacgctgaagacgccgcctacatggccgatatcggactggaggagatccgggcacacaacaacggcatgtggacctgggttgtcgagaaggaagactga

SEQ ID NO: 9666 - DNA, 906 bp, synthetic construct
  source 1..906: mol_type = other DNA
atgattacggtgcttagcgggggaacaggcaccccaaagctcctgcagggactaaaggaggtagttgaccctaaggacctgacaattattgtgaacacactagagaatgactacttctctggggtgtatgtcagcgccgatattgacactgtcctgtataccatggccgacataatcaatgacgagttttggtatggtgttaaaaatgacacttttatcacccacaaccgcctggaggagctgggctgcagcgaactgctccggattggggacatcgacagggcaactaaaatacaaaagacgcagctgatggaaaaatacgggcttggcaaggcatgcgagatccaggcaaaaaacatgaatattcaatcaaaaatcatcccaatgagtgaggaggacagtgatattaagatcatcaccgatatcggcgagctggagttccacgatttcctgattaaacatcagtccgagcccgaagtgtcggatcttaaattttccaaagtgtctcccacggaaggagtcatcgaggcgatcgaaaacagcgaggccgtaattatcggtccgtcaaaccccatcacatccattagtccaatcctctccctcgatggggtgtgtgatgccctgaaggacacctacgtggtcgctgtcagccccatcgtgggctcagactccgtgtcgggacctgctaacaagttcatgaaggccctcaacatcgacgttagctcctacggcgtggccagcatatacgaagacttcttagacacaatcgtcattgacgtacaggataatgataaaaaggatgaaataaatcagatagtgaacaaggtgataatcaccaacaccatcatgaacaatttggatgctaagaagaacttggcggaaattatcattgatagtatcccttga

SEQ ID NO: 9667 - DNA, 765 bp, synthetic construct
  source 1..765: mol_type = other DNA
atgagtatagagttgttcggactggagaacatccctattattgacggcaatagtgacatttcaaaaatcatcaaggaagccatcgagaagcagggctgcaacctgtgtcatggagacatcatcctcatcgccgagaccctgatcagcaaggctgaagagaattttataaagctggacgagctgacgccatcaacccaggccatcgaactggcgaagaaagccaaaaaagacccaaagttagtggagtctataattcagcagtccaacgaaattgtcgctgtcggccccaagttcatcataactgagacagtgcacggtttcgtatgtgccaatgcaggcattgacgaaagcaacgtcggcgatgggctggtgaccctaatgcctaatgatgcggacatcagcgctctcaatattcgcaagtacctcgaaaacgagtttgacgaggagattgccgttatcatcaccgatacacagggacgggcattccgattcggggccgtggggaccgccatcggatgctccggtatttcgccgatatggaaaagagttggggagaaagacctctatggaagggagttggaaactacggaaattgcaacatgcgatgagctggctagcgctgcatctcttatcatgggtcaagccgacgaaggcctgcccgtggtggtgatccgcgggttcgacggctttgataagctccgggatgtggattccaacatcaagagcgtccttatgcccaaagagtttgatgtattcaggaactga

SEQ ID NO: 9668 - DNA, 627 bp, synthetic construct
  source 1..627: mol_type = other DNA
atgtatacaggtcgaattttgagcactggcatgaactgtgagggtaagcctttcatagcgtatcgggtctcaagcaggtcattccccaataggcaatgcctgaaattcgaaaatcgcgccgctatcgtgcccaaagaaggattcgagaaggacatctttgagaacccttatattacctacaattgtatccggatagtggatgacgtggcgatcgtgtccaatggatcgcagaccgatgtaatcagcgacaagatttctctgggcatgaacctcagagacgccatggcctatagcctcctaacgatggactacgagaaggatagttacaataccccacgcattgccgcagtcgttacagcctccaccgacgaagacggctacggatgctacatcgggatagtgaacgacaacaaaattctggtcgaacaggtgccacacgggaaggccgccttcatctccacatacggcagtcaggttcccgataccgtggatttcgatgcaaaaactgctaacgagtgcgccaagtttatttttgacgagggcgctttcgcagattacgaaaagccggtaacgtctagcgctgcgatctttgacggggagtgggcaatcgacgtctataacccatga

SEQ ID NO: 9669 - DNA, 411 bp, synthetic construct
  source 1..411: mol_type = other DNA
atggcaatcgacgttggcaagcacaagaagaaaatctcggacagcaaaccaagtatcaatctggtgccgttcatcgatatcctattcacaataatgatttttctcgtcgtaacaagtaacttctcagccgatgtgcaaacggatgattccgacgtgaccgacggtggctccggaaagcctaatgtgacttcagtgagcggggactctgaatactatgtcatgcccgtcgctaacctgcataaagtgacagtcaacggcgtggacaagagcgacaccattctgaacagcgccgtaggggttcaggcgaatgtcattgacaacgggaagatcaccattaaacccggcgagatcgatataaccactcctgatggagtgtcccccgacaaggccgtgcagcggccacagctctga

SEQ ID NO: 9670 - DNA, 840 bp, synthetic construct
  source 1..840: mol_type = other DNA
atgattattgagtccattatgcccttcgtggatgggatagtggacatctttactcaggggggcttcatcacatatataatcctgttcattgggatctatggtcttattattggactgcggaagatagcataccttaggaagatcagtaaggtggacacaaccgagatatttggggtggtaaccgccagcatggagcgaggaggggcggtcgaggccctcaagcagatcaatggcttcaaaaaccccatcagcagaatcatctcggagactttgaaaattggctacaagaacaagacagaagtggaggagtccatggagcagatcttcattgtcgaagttggaaaaatgacgaagggactctccaccatcaaaaccctgacggaactagcaccattcctgggactgatcggtactgtgatcggcatttggctgacctttaaatcactcggcgtccatccggatagcgctgctatggccgaaggcatttacgttgcattgaccacaacaatcatggggctcctggtcgcaattgtgttactccctatacacacttacatccagggtcttatcgaagtggagatggacaagatcgaactggccacgaagatgaccaattggggctatgccgtagtgaaagtccgcgtggattcaaatgtagaatgtgccctggaggctctccaggaagcggagggcgtggtcaacacacggctgattagcgacccatacgccaacatcaaggtgagctttaaacccagcatgctggacaaaagcatctccaacatcatattggagaagtgcaatgttaacgctgaaattaccgagagtaagctaaagcaatga

SEQ ID NO: 9671 - DNA, 615 bp, synthetic construct
  source 1..615: mol_type = other DNA
atggatatcctgggaatcgatgaagcgggacgggggtcggtcctggggcccatggtgatcgccggagtgatcgtgcctgagaaaatggacaaggtactggagcgcatgggcgttaaggactctaaaagactcactccgaaccggcgcaccatcctcagcagaaagctccgcaagatgttcgagtacgaaattgtcgtcataagtgcccgggagattgatgagctgagggcgaacgggataaatctgaatgaaatagagaagaacgccatggaaagcattatccttaagctaaaacccgaaaaaacgattgtggatgcagtagatgttaaggctgagcgtttccaggagaacttgtgcaacgacacatgttgcaatgtggtggccgaacataaagccgacgataagtatatcgaggtgagtgcagcaagcattatcgctaaagctgaaagggacgcccacattaatgagatcaacatggactacgtgaattttggcggcatcggctccggttatccatccgacccaaccacaaaaaagttcttaactaactacacctacgacgagatgcccgactttgtccgaaagtcatgggctaccgtggccaagatgaagtga

SEQ ID NO: 9672 - DNA, 1074 bp, synthetic construct
  source 1..1074: mol_type = other DNA
atgaacattttcggaaaggaggaagaggagccacagattaatgataccaaagtgataagcaacagtctgggaatcgacctgggaacactgaacaccgttatcgcaaagccttccggtgacaagtttgacttgtatcagataccaagcgtcgtggccgtgaaaaaggatgacccctcagaggtgctcgccgtgggggaggaggctaagaaaatgctaggacgaacccccgaagatattctcgccgtacggcctctgaagaagggagtaatcgagaacgtggtgcaggctcaggccctgttaattaaggccatgcagatcgggatcaatgagggggagagtgttggacgcatcgtgattggcatccccggcgacgcctcagaagtcgaaaaaaatgcggctgaagagataggtaggaaggctggggcccagaatattctcgtgatttccgaaggcctggccgctgctattggcgcaggccttcccatcgcggagccaaacggcacaatggtggttgacatcggggcaggatcaactgacattgttatcattagcctaggcggtatcaacgacatcgaaaccgtgcgctgcggcggcgatgacatcgataacaagattgtcgaactggtcgctgagaaatacgacgtcgccatcggcatccatgacgcggaatccgctaaaattgaagtagggatggtgcactgttctgagcagctggagaacctctccgtggagattatcggtaaatctctggagacaaacaggcccaaaaaggtcatcatcgattctatgctggtggcagaggcagtggagccgtacatgcaacaaataatcagtggactcaatattgtcttggagcggctgtccccggagttgatgatgggggtgtacaataacagcgtggcggttggcggcactagcagactgcgcgggatgaaggaacggatcttcgatgaaatatcgatcccaatagaagttagcgacgatcctatgacggtggtagccaaaggtacggcaatcgtcgccgccgagcctcttgccctcgagcccgaagtccgtcttagagccatgaagtga

SEQ ID NO: 9673 - DNA, 645 bp, synthetic construct
  source 1..645: mol_type = other DNA
atgatcgaggacaacatccgggtgcttcggcaagcagccaaggtttcctccaatagtggctacgagatcgagaaaaactggtgcgtgatcgccgggaatgctgagataattgataaaatagcttacaaggccattgcaagcaaccaccgagtgaaaatcatcttccgcgaacacgtcatgctgaacgacgggaaattggacaaaaagtttgacttcatcatgctgtatggcaacagcattgtgattgatgagttcaagaagctcgccgaccagtacggtggagcctatgtgaggatactccataagtatttgattgaagagccgaatctcatggtatttgttgcgcctgataacgtcattaagaaaaccgtgagcgtcatcgaaaaatcgaagatctccttcgccatcctacaggattcacagactaccgccttcatcgacgtggacttaagtaatgaggtgaagctgcccaattttatcaaatctgcactgaagccattctacaacgcgaacgaagtggttctgagcacaatcctgatttccgtcgataagaaggaggaaattaagaaagtgcagagcatagctacaagcaacagaatcttcgtcatcgactttaaggacattgtaacggaggattactcatga

SEQ ID NO: 9674 - DNA, 696 bp, synthetic construct
  source 1..696: mol_type = other DNA
atgaagattgagaacacaaatatgaaacgcttcattgccctgtccgacatcattagcctgctaaacatgacaagcggattcttatccatcatcttcagctttaatcacgaatttaatatcgctgccatcctgctcattatcgccatcatgttcgactcggccgatggttgggtcgcgcgaaagattaataggcaggacgagttagggtttgggaaaaacattgattcactgagcgacatcgtcagcttcggagtggcccccgcaatatttctttacagttgtatcaacaccaccccgggcatcttccagatcattgtaacgattgtctgcctcctgattgtggtttgtggcgtgctccggctgaccagatataatgtgattgctggcaaaataaacactaacgattttattggattcccaattccagggatgtcactgatgatcggttctttttatctcagcggcatattcaatccccatatcgcaatcctgttgagtatcatagtgtccttgcttatgatcagtaatatcaagtaccctaagttcgataacatggctctgattggcatatcctgcatactgatcataatcctgatcctccctatcgacatgattctctttaacattaacatccccgcgatcctattgcttttcttctgcctgtactacctcatcatcaacctgattaagaaatga

SEQ ID NO: 9675 - DNA, 1170 bp, synthetic construct
  source 1..1170: mol_type = other DNA
atgaacgacaagaaaccacgcgacccactgtatccaaagggtttcgaagagactcggaagttaaagaaccaactcaccaaggaatacagcaaaccaaataaaaaggaggatgaactaaccccgcttaaaaagctcaaccacaagcttggagtgtacctcagccctaatagcgttgagatctcaaacgatgagaagaagaagaaaattggcataatcataactacgctgatactgatcaccctgattagctcagcgtactatttcctgatctatgagcccgctcaggaagagctgacccttgcgaagacaaccaagctcaacgagttgcacgagatatacaacggacccctcactacctcccagaacagtattttgttggaaaaccagatcaatgatgggaaaactcccgaagagatcgagaggatcaacatcctgacccccgcaaccaaagactggcagtcctttcacaaaaagtcgatttacacaaataaggataaatataaccgaactatggccatatattcaaatgagagtaagaacatcatcctgagcacaacaaaagccatcaagattgtcaacgagaataacgccgaagtgctgagcaaaattaagttcgaagagccaaacacggtcagcgttcccattctcatcagccggctgcaggctggagcaggcctcgtaaacgtaggcagcgtggtggacatctacacaaacaacaataatacaaacgagaattacactcctaacaatacgagtcctaatatcagtggctgcaccgtgctcgccatcatgagatatgaggacaatggagagatcgactccaaatactctaaatccaatacaatcatcaaggggaaccataccaacccgaaggagaatacgaaggagttttcctcagacgtcctggagctgattaaggggtcgattattaatgggtatgacgaagaaaaaaccattgaaattcttaaaaactacggcataaagctaagcaattacgagaggcagattaacctgggtgacttaaatgcccagtatatgctgctgatcgagacccctcaagataaagtggaatacgtgatcaacaacatggaaaacatcattttgacaatccccactaccaaggctcctaattggatggtcaacgaaataagctccacgtaccaggattga

SEQ ID NO: 9676 - DNA, 720 bp, synthetic construct
  source 1..720: mol_type = other DNA
atgaacaagccaacgattagcaccattgtcattatcatctgcatcctgataattggactgtacgccatgggcgaggtgaactacttttcatctaaaattgctgtggaacgcaacatcgactccccaactattctgatacccagcattggagtgaatgagaagatcaataatgtcagtctcaaccaaggcgtactgagtgatcccggcgagaacatccccactaaggattacgtcgcattatatgggcacagaacccttcagggtagcccctttttccggctgaacgaactttcaattggggacagcatcctcctcgagtggccgggggttggcgagctgaactacacaattaccaatacaaccatcgtgcctggcactgcggatgtgcctatcggtggaaacgacagtttgttcctaatcacctgtgaccctatcgggtccacggccaataggataatcattgaaggcacactagagaagcagaatcctattaacaacgaaattatcaaggaaaacccacaggagtccaatgccatcataatcacagctatattctttatagtgggatgcatcttcagctatttctatccaaaagacaatcgaatctacatcttggccgttatcctgatcatctcggcactgctgttctattcctgcatcaaccccatcccgagcgagatcatttacgagaaaattatatttctcaacgggggcctctga

SEQ ID NO: 9677 - DNA, 375 bp, synthetic construct
  source 1..375: mol_type = other DNA
atggatgttgataagaagtatttctcaaacattacaacacgagagcgggcgatcttcgaaggcgccattagcatgggtgccctgttccaccagttcgtgggaaccccagtgaacaaatacaccaagaatggcttggagaaaagcatggaggactccctacgccttcagcccgcaatcgaagacgtgaacgtcaagatcagatttgacaaactgaaggaaagtatgacggagtttgactacacttctctgaacggggatatgctcgatgtgaaaatctacgccaaggtcgacaatgtgaaggctataattaggatagaatttatcgaggagctcaattacccgctgatgtatgtagaaaacatcaccgaggactga

SEQ ID NO: 9678 - DNA, 1158 bp, synthetic construct
  source 1..1158: mol_type = other DNA
atggacgagaaatcaatagacaaggacgtgatcctcaaggagctggatgaactccacaacctggaccacaactatgcagatgggaggattctcggcagcatgtgcactgaggcccatcctttcgcaaaagagatctattacaagtttcttgatacaaacctgggcgaccccggtctttttaagggtacaaaactgatagaaaataaagtgatcgaaagtatgggcgaaatcctaagcattgagaaaccctacgggcatgttgtaacgggaggcacggaggctaacctgatggccataagagctgcgcgcaaccatgcacggaagtacaagggcatcgtggacggggagatcatcatccctgaatccgcccacttctcctttaaaaaagccgcggacatgctgaacctgaagattgtcgaggccgatctggacgataattataagattaatgtaggaagtgtgaagcggctgatctcggacaaaacagtcgctatcgtggccatcgccggcacgactgagttagggctaattgatccaattgaagaaatcagtaagatcgcctacgaaaataacatctatttccatgttgatgcagcgtttggcggcttctctataccatttttgagagacatgggctacgaccttcctgttttcgatttttcactggatggggtctgttccataactattgacccccacaagatgggtctggccccgatcccggcagggggcattctgtttcgcaaggaagagtacctggacgtgatggccgtggactctccatacttgaccgtgaagacccagagcaccatcgtcggaacacgatccggtgctgcttctgccgctacctatgcagtcatgaagtatttcggaaagaagggatacagcaaactgattaaggagctgatggacaacacccagttcttaaaagagaatctcgagaagatcggatacgagatcgtgtgcgaaccagaattgaatctcatcgctttcaatcaccccaacatggagaccaatgagttcgccgagaaactggagggattcgggtggaaagtgagcgttgcgaagtgccccgtcgccattagggtggtacttatgaaccacattaaactcaaccacctcaaggaattggtggaggatctcaaggagatattctga

SEQ ID NO: 9679 - DNA, 2277 bp, synthetic construct
  source 1..2277: mol_type = other DNA
atgtatgtgaaaaagttcgaggatctcaacaaatccgacatcccaatcgctggaggaaagggcgctaacctgggcgaactgacccaagccggcatcccagtacccccgggcttcgttgtgaccgcacagacctacgagaagttcatggtggaaacaggcattaacgatcaggtgttgtccattctggatgagattgacatcaatgacaccaaggctctgcaagcagccgctgaggaaattaaagcgattattaatgaagtccccatccccgaggatatgatattgatcattaccgaggcctacaatcagctttgtcagagatgcggcgaggaggatgtggaggtcgccatccgcagctctgcgaccgccgaggatttgccggaagctagcttcgcaggtcagcaggacacttatctctatgtgagcggcaccgattcagtcctggagtacgtgaggaaatgttgggccagcctcttcgaagcccgcgctatattctacagggaagagaataacttcgaacactccaaagttctgattgccgtcgtggtgcagaaaatggccaacgctgacaaggcaggggtcatgtttactgtgaaccccagcactggggaagacatcgccctgatcgaaggaagttggggacttggagagtctgttgtgtcgggtgatgtgacccccgataactaccaggtggccaagaaggacaacgacattatcaatgtgaccgtcagcgacaagaaggtcatgtacgtgaacgacgaaaacgaaacaagcgtgaaggtggatgtgccagaggacatgagaaacgagcgggtgctctcggacgaggagctcatcgagctgacagagatgggtaagcgagttcaggctcattacggtgagccaatggacactgaatgggcattcgaaaaaggagagctcttcctcctgcaggcaaggccgatcactacattgggggacgtgaccggagaatccgtggaaaccagctctgacactggcgaggtgctggtcagagggctcggcgcctccccgggcatggctagcggcaacgtgaagatcatcctggacattgacgagttagataaaattaaagatggggacataatggttaccacgatgactaccccagacatggtgcccgccatgaagagatcaagtggcatcgtcaccgatgaggggggcgtcacatgccacgcatcgatcatttcccgggagctgggaatcccttgtgttgtcgggacgggtgacgctacaacaattttgaaggaaaatactggggtcaccattgacggtaagaagggacttgtatttgacggcatctcagaaattaaggaggaggccgtacaggtcaaggtgtccgctgaggccgcccccgtgataacggtcaccgaggtaaaagctaatgtgagtatgcctgaggccgccgcaaaagccgcggcaaccggggccgatggggtgggattgctacgaacggagcacctgatgctcacggccggcattcaccctggcaaattcatcgctgatgggagggaggacgaactaatagacactatagccgagaatgtgatgatagtggcagatgagttttatcccaaacctgtctggtaccggacactggacgcccctacggacgagtttatcacactggaagggggagaaaacgagcctgaggaacacaacccaatgctcggctggagaggaatccgccgcgaactggatcagcctgagatccttaagtgcgagtttaaggcgattaaaaaattacacgagaagggctacactaacatcggaatcatgatcccactgtcccagagccccgaagagctgaagcaagctaagtcactttgcagcgagattggccttgaaccacataaagatgtggattttggtatgatggtggagatccccgctgcagcactgacaatcgaagattacattgatgtcggcattgactttgtaagtctgggaaccaatgacctaactcagtataccctcgcggttgaccgaaacaatgaatatgtggccaagcattattctgaagagcatcctgcagtaatgaagctgatcgagatgacaatcaaaaaatgtgttgaagccggggtgaaatgcagtatatgcggccaagcggggtccgtcccccgtatcgttgagaagctggttgagttcggtatcacaagtgtatcttcaaataccgacgccatagctgaggtccggaagacggttgcgagggcggaacagaagataatcctggatgccgcccggaagcgcttagaatga

SEQ ID NO: 9680 - DNA, 483 bp, synthetic construct
  source 1..483: mol_type = other DNA
atggtgcgtgcttatacaagacgggactacatccggaaaacccccaattcaagaattgtccagtacgacatggggaatctgaaggacgagtttcccgtctccgtatccctggtggtgaaaaagcccgcccatatacgacacaactctctcgaggccgccaggattgccagcaaccgcctaatgcagagggctgccggtcgattgggctaccacctgaagctgcgggtgtatcctcaccagatcgtaagggaaaacccgatggcaacgggggcaggggcggatcgcgtccaaagcggaatgcggaacgctttcggaaagcctatcagtgtggaagccattgtcaaaaaaggccagcgcatcgttaccatagattgtaatgagaagaacttcgagcaggcgaaggtggctcttaagagggccggcatgaagctcccagtgccatgcagaatcgtggtggacaagggcgcagatctggttaaatga

SEQ ID NO: 9681 - DNA, 228 bp, synthetic construct
  source 1..228: mol_type = other DNA
atgaatgtcaagggcaagatctacctggactacaataataaagaaagtgcggagcttatatttaactccttggagatcgacaacaagaactatctcaaatcaaaactgaaggaagacaagatcatctacgagattaacagcgagacactggggagcttcctcgcaacggccgatgacctaatcgcttctgagattgtgattgaaaaaatactggatgccacccagtga

SEQ ID NO: 9682 - DNA, 1137 bp, synthetic construct
  source 1..1137: mol_type = other DNA
atggagtgctattaccaccctgagaaggagagtacagccaactgcgccatatgcggaaaaagtgtgtgtggggagtgctccctggagatcgcagggaaagtttactgtaaggagtgtctggagaaaattgtcggtctaggtatccagaataacatcccggaagagaacaagtccgatgaacaaaaccccatcgtcaccgagtcacctgaggttaatgcgcagagtgtagacgataatatataccagccccaggaggaaacagacttcgagataccatatactcctcaagaggaagtgcctagcaaggagtttaaaggcatttccgatgactcaccctacaatatcaaagaaaacatcgagtatacgggaggcctcgaatcctcttacacaatcgattccgatatctaccaaaagcctcaagtggagcaacagccacaggtcgctcagaatgagctggacattaagcagcccaccttgaactcgatgaacaaggacgatttcatctatcccgaccacgactacgaaccacccaccactagcgcccgccaggagttagaggacaagtatgaaaaatatctcgacgatttgtacttcgacgagaatgaagtgccactgggcgagcagctcgcaaaggacgaagcccagtacggctcgttaaccagaaaggaatatgcttctaagccgaagaacatcgtggagcctcagatccccacccagaaagacgagccaatcatagaaacccccgaagagatggaagcccgaattagggccgagatcctaaaagagcagggactgatgacagatacccagagcattgatagcactctgaaagaagagcttgagtccagcaaggggaaaaagctctttgggctgcggaggaacaagaacaatgaagaggaactgatcacggctagtgaagataaaaacatccataaccttaactacaaggacgagaaggaacccatgggcgtggtcgacatactgctgaccatcattctggttattgtgatactgattgtaatttactacatcgtgtaccttttcctcctcagctcaacttatccaacattcatggacgcagtctttgcgatccggaacccgcagaatgtgattaatagcattctgacgcagttgtga

SEQ ID NO: 9683 - DNA, 1083 bp, synthetic construct
  source 1..1083: mol_type = other DNA
atgtcccaagtcttggatatcctcaaacgcgataaggagctctttttcagtgatgtggagatggaatgcaacaatagcgacacctcctcagacatgaatctgatcgccgacttcaccgagtacaacccgctgcacaacggccatttccactgcatgaagaccgcaaagcatatgttccctgacagtctgttcgtggcgattgtccctggactattcgagcggagtggcagggggattccatacatactgcccagagaaattagggcagagatcgccatctccgtgggcgcggatattgtggttgaggggcctcctatggggatcatggggagcggccagtatagcttatgtctttgcaagatgtttaagtcactcaacaccgactacatcccaagaggatacaagcccaaggagggttttgatgagattctgaagcggatcaatttaggacaccatatagccccaaaaccgtataaaattgtagacaaaacggctcatgagactatacttaacgataagcttgaggaggacaattacgtcataacaagcttcagcaatagcttgagcaaaatcggctttgattacacaaacaaatttatctttgtgaagcgcattgaaggggtaagcggcacgctgatccgagaaagtatccagaaggacaacttcgacaacgtgctaaacatgatgcccagcgagaccatcgaagtgctgaagcgagagatcaagaataactccataatttatggcattagggacgtcgaatcaatcctggatactgccaacacattcaactttgaggagctctcggccctcaacctgttcaatgaaaagctggctaaaaacattgttaacaataagccctatgagaatctcgacgagttggaaaaagtgatcctgcacggattctcatcgcactttcaccagagagtgctgagcatcttggaaaaccccatccccaaaaaaattatttctaagtacatcgaaaagtacccatccaacatccgggttctcggttatcgcaataaagaaatcctggagaagttcataaagaaagtcaataatgaaaacatttcccttctgtga

SEQ ID NO: 9684 - DNA, 1257 bp, synthetic construct
  source 1..1257: mol_type = other DNA
atggacctggtcatcaagaattgcaagctagtgaacaaaattggcgagtattcaattaaggtcgaaaatgggaagataaccaagatctcaaaaaccccgctcaaggccgataaagtaatcgacattaagagcaactacattatgcctggttttattgacccccacatccatttccgagatcccgggctaactcagaaggaggacttcaagacaggcagcaaaagtgcggcgaacggaggctttaccacggtgatcgacatgcccaacaccatccctaaaaccaacacctacgaggccctcaaggagaagattgagatcgccaagaagaaatccgttgtgaactttgagcttcaggccggacctaataatcttgaggaaatgaaaaagatgatcaaattgaaccccatttctttcaagatcttcatggacctcgagaacgatgaaagtctggaggagatcttcaagaatctgtccatactgaaggagaacaccaaatacaacggcctggtggcagtccattgtgaaaagaagtccattgttgagaatgagactgccaagctgaaagagaagaaggagaatatcccgatcgattacacgtatgctagacctaccacaagtgaagacgccagcgtaattcaatctattgaactcgccaaaaagaacgacctgaaactgcacatctgccatttaagctccgctaagtccttgcatatagcaaagaacgccagcaaaaacatggatgtgacatgggaatttactccccaccacctgcttctggacaacaccgcctacaatacatatggtacattcataaagacaaaccctccactgcggccaaagaacgaaagcgtcaggatcgaggacctcgacgagacttcgatcataggcacggatcacgcaccacacaaaatcgaagacaagaccaaaggcgtgtggaatagctcaccaggaatccccaacttagagacggttgtgccactcatcctcactgaggtgaataagggaaatattaagctggatatcattccgaaaatcttctctaaaaatgctgctatggcctacggcctgaaaaacaagggggaaatagcgatcggtaaggatgctgactttactgtgattgatttgcgccaggaagggaaattcaatatcgatgaatttaaaaccaaggcaacatactcgcccttcgacgggtggaattatattggcaagcccgtgatgaccatcgtgaacggaaacccagtcatggacaaactgtga

SEQ ID NO: 9685 - DNA, 1236 bp, synthetic construct
  source 1..1236: mol_type = other DNA
atgattgtgtttaatgatgatggctgtattaaatgcggggcctgtcaggggacttgccctacctccgcgatcgaggtcacaccgaacgctattgtccattgcgacacttgcggggaggagccaaagtgtgctgacgtttgtccgaatggtgcccttaaagtcgaagagtacgagatcgctgagggcatctcccaggcacgcttggtgtttaacagcatactgtgcgaccagtgcgggaaatgtgaggaagtttgtccacaagaaactataaaagtcaccgggacaaaattgaaggaggtggaagggttctgtgtaatgtgccagaaatgcgttgacatctgcccagtggacgtgatcggggtgcccggggtgaaggagcccgcagagtatgacctggacctcaagggaaagggccccgtgtacattaaggactgcgtgggatgcggcacctgtgtggacccctgtcccgtaggcgcgatcactctggatgaggtcggcagtcctgtgaccgtgaatgatgattgtatcagatgtggactatgctcccaaacgtgcccatggaatgccatattcattgccgagaaaaagcctatcaaacggacaaaggaaataaaatcatttaccttcgattcagccaagtgtatcggatgcaacacttgcgtcgaagcctgtccgggtgacttcatcgccgctaacagttcgagcctcacggtggccatccctagcgtatgcgccgcatgtagcttatgcgttaacctttgccccgttaatgcactggaaatcgatgtggagtggggcgaaggcagccctgtggatgcggaaggcattggaagggacgtcgagaagtgcgactttataggagcatgtgctaacaaatgtcccacagaggctattcgcgtggtgaccaagaccggtatgtcctgcccagccctggtcgagaccgacgccgagccatctttcacgagttgtattcgatgcggagcgtgtgccagcgtctgctctaacgatgcactcaaggtggaacagtacgaagtaaccattaacggtgaagctgttgctagggatcggatcgctttcaacccaagcaagtgtaaccagtgcggcgactgcatcgaggcctgcccctatgacatgatccacaagacagaaaatcctaagctgcccatcgccggcttctgcacactgtgtggtcagtgtctcgaggcatgccctgaggatgccctgtgctacaagtga

SEQ ID NO: 9686 - DNA, 1428 bp, synthetic construct
  source 1..1428: mol_type = other DNA
atggtgaaacttaccatggaacccgtgacacggatcgagggacacgctaaaattaccgtgcaccttgatgacgcgggaaacgtggaggagacaaggctacatgtgatggagtttcgaggcttcgagaagttcttacaaggtcgtcccgtcgaggaactcgcccgcatcgtaccaagaatctgcggcatctgtgatgtccagcaccacctagcagccgctaaagccgtcgaccagatctttggctttgacgactatgacattctgcccgctgcctataggatgcgggagattatgaactgggggagttacatgcactcccatgccctgcatttctacttcctcgcggcacccgatttaattattcctaacggaacccggaagaccagaaatgtgttccaggtgatcaaagacatgccggaggtggcacttcaggccatcaatatccgccggaacggccttgagatggtgagaaagatagggggccggccaattcaccctacaagttcgacccccgggggtattagcaccgaactggacgacgaaacgcagaaagatctgctcaacagggccaagcaaaatgtggagctggcccaggctactttggatctggcgatccctgtatttgaagagaatattgacctgatttcttcactggggaattttggcgatactcgccactgcggtctcgtcaagccggatggaacatgggatgtctacaatgggaacgtcaagatcaaggataaggatggaagcgacctcctggaatacaggaacgaggagtacacggacatcgttgctgagcatgtaaagccgtactcctggctgaagttcccctatataaaagaactgggttatccagagggtatttacagagtggcaccattgagccgaataaatgtgtgtgacgacatgcctaaggaggcacctcttgcaagagatgcgctgaaagactttcgttcagctttcggctatgcacaggcccccctcttgttcaactatgctcgcctcatagagctgctagcctccgccgaatgtgctgccgccgcactggaggaggatttgtctggccagaagttcccagaagaactggagcggactgaagggaagggcgttgggatagttgaggccccccgaggcacgctgatccaccattacgagagcgatgagaatggactgaccactaaggctaacatcgttgtggccacaatccagaacaaccccgccatggaaatggggattcaccaggtggccaaggactacatcaaacctggcgtggaagtcgacgacaagatctttaacttgatggaaatggttatcagggcctacgacccatgcctgagctgcgcgacccactccatggacagtcaaatgcgcctcgctgaagtcgatatcgtggacagcgagggaaacctcataaaaaaattctga

SEQ ID NO: 9687 - DNA, 927 bp, synthetic construct
  source 1..927: mol_type = other DNA
atggccgataaagtaaagataggcactatgtggtttggcggatgttccggttgccacctttccatcgcagatttccacgagtccttgattgatgtgatggagtttgccgacttcgagttttctccggtgctcatggacactaaatatgatgaggtcccagaattggacataattattgtcgaagggggcatccggaatgatgaaaacagagagctgtcagagatgttaaatgaaaaatccaacatggtgattgcgtacggcacctgttcttgctacgggggcatcccaggtcttggaaacctgtggaccgttgaagagctggaggaagaggcctacatcaatagcgtgagcaccgtcaaccccgagggaatcataccccatgaagatgttccccacctcgagagccgcgtgcgccctatcggagagacgatggacatcgacctaatgatcccagggtgcccaccccggtcagacgtggtggctgaagccattctaacactgctgaaaggggaaacaatcgaactcccaagcactaacctttgcgaagtgtgtcctcgagagaagccaccggcgggtctggctatggacttcatcaagaggcaattcgagctgggcgctcctgagccggatctgtgcctcattagtcagggactcgtgtgtatgggtcccgcaacagtctcgctgtgtggagcagagtgccccgccatcggcatccagtgcaggggctgctatgggcctacggctaaggtattggatcagggagccaagatgatcagtgcaatagctagcgattatggggtgcaggaggacaaaacggtcgaccctgagaccgttgccgaccaactggacgacattgtcgggaccttctacacctacacactccccgccgccctggtgcccatgaagatgcagaagggcggcgaatga

SEQ ID NO: 9688 - DNA, 426 bp, synthetic construct
  source 1..426: mol_type = other DNA
atggccgacgatgtaaagattgtcatgttttgctgcaactggtgttcatacggcggagccgacaccgcagggacagcacggatgcagtaccctccgaacatcagggtgattcgcgtgatgtgcagtgggcgcatcgacccacaatttatactgaaggccttcaaagaaggggctgacggtgtgttcgtggcgggctgtcatatgggcgactgccactatgatgctggcaactacaagcttgatcggaggatgagactcgtttataagctagtcgaggatatgggaatcggaaaagaaagactgcaccacgactggatatccgccagcgagggcgaaaagttcagcgaggctgtcaagatgatggtgagccgaatcaagggtttggggcccgcgcccctgaaaaaacagctcaatgccgagggatga

SEQ ID NO: 9689 - DNA, 1236 bp, synthetic construct
  source 1..1236: mol_type = other DNA
gtgcgcaatgtgtatgaagacgctgagagggcaaaagataaaaaggcagcaatcggtgccgacatcaccatcgagaacttcactgatgaaacaatcaatgctattgacatgattgatgacttagacgacctgagcaaacagacaaagaaggacctgctgaaagtgggcgttgacactaacgaggaaaatagggcgggctcatttctgcaggtggatcagagtaatatcttcaccaacaattccatctcagactcaattgaggtaatgaacatgggtatagccttggagaagtattcctggctcgaagactatatgtggaatgtggtcaagccagatgcggataagtacacggctaagaccgccctgagagagaaggaggaaggtgtgacaagcgggtattttgtgcggagcctgccaagcactaaagaggtcatgcctgttcaagcctgcatgtttatcagtgatgccgacatcatgcagacggctcacaatgtcataatagccgaggagaactctgaactgcatctaatcaccgggtgcgctaccggggatgacattagctctgccatgcacgtgggggtgagcgaaatgtatctcaagcccgggtcaaagatcactttcacaatggtccacaactgggccgaagaagtcgaggtacggcccagaacgggcatcaagctcgaggataactccacctacatcaacaactacatccttacaagcccagtcagcactattcagagcttcccgacggcctactgtgacggcaaaaactcccgtgccatcttccagagtatacaaggcggcaagaaggattccatcattgacgtaggaagcagggccctactgaacgccgagggtgctaaggcagaggtcatttcccgggctgttgcgcaggatgagtcgaaaatatacgcccgaggacatttggcaggcattgtgcccaatgtgaaaggacacctcgagtgccacgggctggtgctgtcagacgacagtttcatctacgcagtgcctgaacttgaagctagttccaccaatttggagatgtcgcatgaggcggccgtgggcaaaatttctgaggacgaaattaactacctgacaagccgcggaatacccgaggaggaagccgagtccatgattgttcgcggatttctgaacatggacatcaccggccttcctgatgaactcgcacagcagacccaaaacatgatcgacatgagcctcgatggaatgtga

SEQ ID NO: 9690 - DNA, 756 bp, synthetic construct
  source 1..756: mol_type = other DNA
atgctcctggagatagaaaatttggcggtggaagtcgccggcaagcgcgttctgaaaggggttaacctgtcaatcgctgaaggcgaaactcacgtgctgctcggcccgaatggcgccgggaagagtacactcttccttacaattctaggtttcccacagtatgatgtggtagaggggtctatcaaatttaaagggcaagacataaccaacctgaccacagccgaaagagttcagcttggcattggcgtgagcttccagactcccccagcaattaggggaattagcgtgggcgatctcctaaagatcatatccaatcaggacgtgcgagaagaactgaacccaaggatgaaagagctggctaaccagctgaagttcagtgacgagtttctggaccgtgacgtcaatctcggattctcaggcggtgaggtcaagcggtccgagatcctgcaactgctggctcagatgcccgacttcaccatgtttgacgagcctgactctggggtggatatcgaaaatgtagagcttttagccagcgagatcggaacgttgttagacaaggacaagccccagcggattagacaacgcagcgggcttctgatcacccacctcggatacatcttgaactttgtctccgcagataaggcgcatgtgttgattgatggagtcatctcctgctcgggcaaccctaacgagatcctcgaggatatccggaaaagcggtttcaacggatgcgtggagtgcgcccagtgtctgtga

SEQ ID NO: 9691 - DNA, 267 bp, synthetic construct
  source 1..267: mol_type = other DNA
atggagaacaagcagatacccaggcgcgaggagaagctttggagcgagatcaaaaactaccaggtcgcgaccaacaatgcacggattctgggagtgctggacgaactaatcattaatgaaaagacgggcaagatcgtggacattgccatcagagtcgagagcgatcggaatatacacgtgaaaggtgctaagcgaaacggggacctcctgctcgttccattcgccaaagtggagaaagtgggcgaatttatcatcgtaacagaatga

SEQ ID NO: 9692 - DNA, 609 bp, synthetic construct
  source 1..609: mol_type = other DNA
atgatctacgcaattttgatggcggggggaaagggaactaggctggagaccccctgcgagaagccgctttttcgcctgcatgacaagcctctcataaagtacgtgcttgataatcttaaggagtccaagctgatcgacaagatcgtcatcgccgtcagtccccactcctgtgagaccacaaagtacctaaaaagcctgaacgacgatttcgaaatcctcgacacgagcggcaaagactatctggtcgatttatcatatatcctggattacttcgagcaacggtcgaaagaagacatactgctctttatcaatgccgatttaccattcattagcgctgagacagtggacatcgtgttggagtattacctaaaatcagataaagacgctctctctgttctcgtgccagtagaaatcttcaacgatctggggctggactatagctatgaatttgacggcaacgtcccctccggcctgaatgtgctgaaaagcatgaacataattcaggacgaaaatcagattgtgattcctaaggtggaattggcactcaacattaacaccctcctggatagtaaggttgccgaggagctgtacaaagagtactacatctga

SEQ ID NO: 9693 - DNA, 1470 bp, synthetic construct
  source 1..1470: mol_type = other DNA
atgtcttttctgagcaagattttcaacaaggggcctaaaccagtgatagccaagtcccgagaaggcaacctggcgacacttaccgcccagaaggcaggccccgcctcacccggtgttgtgaaaaaacctgacacgttttacgtcaccgcttccgtggaactgggcaacactaccactaagtgtatagtcatggccacaaatctcaacactagcgagtcttaccttctaaacaaaactgttaaaatgacaagggacattcgccaacctaaacccggagaaaaagtcttcggtaaaaccgtgtggggcattgagctttccaaggaagctgtaacagagctcgtgaaagacaccgtcttggagagcttgagaaagtgcaacgtggataaagataaggacctggattttgtggtcagatcaacgggagtaacagctggcttcgccacggccgaggaggcggggcagctgattatcgccctggcagacggatgtctggaagccgacatccccccgcggaagatgtcccccgccatgagcattagccagcttcctgagcgcctgcaaaagcactccctcctggagaatatcatgtttgatggggccgtggtaagtgtggtgccccctgagggaaaagagaccgtggcaaatgagatggagggagaacttgtgaccgcaggcattaagctgggggctaaatggaccgatgtggattataggaacccgtgcgtttccctggatttcggctctacgctcgccggccggatagtcaatgaccacgaaccctatgccaacactatcggaaacttcctcggcttagcaggggtggttagtgattcattggctaagggctccggtctcatcgacaaaaagaatggggctgccctggacctgtactctgacaaggcaatgaaaaaggctaaccacaagaaggcccaggtcaatgccttagaagcccataaactgattaatatccggaaggtgccaatggacgttgaacggttcggaacggtgccactcaaccccgaagctgctgagaaggcaggaactaccctcataggctgcgacgtgggcttcaacggggataagctggacgaattaatggaattgggtgcgcagttctacgactcggatgggctcccaacattgctaagcaccctggactatgtcagtactaatattgtcacaaggctcctggatgttgcatttgaggaggacgtcatcgtgccaggttcaagcctaggaatcacaggaagggctgggatcaccgggcgcaagcctcagctgatcctggagagcgtccaggacaaattcgagaacgtggtatttgtggaggatggccttgcgctggggtcggccatcatggcccgatgcatgaatagtatgggcaccccaaaggtgccgatcgggggaaagcagggtggcagatgtatcctgaaggaccgtatgaagatgaacggcggcaagttcgcgtga

SEQ ID NO: 9694 - DNA, 933 bp, synthetic construct
  source 1..933: mol_type = other DNA
atgtttcgatttgataaggagcagctcgtggttgatgtggcgggaatgaagatggggggtcagcccggcgagtacccgaccgtgcttgcaggcaccatcttctatgggggccacaatattattagcgatgaaaaggccggggtctttgacaaggatgcagctgaggagcggatcaaaacaatggaagagatgtccgatgtgacgggcaacccctgtgtggttcagactttcggcgctactgccgaggctatggtcaagtacctggagtttgtcggagacgtctgcgacaagccgttcctgatagactcaacggccgctgccgcgaagattgccggggtagagtatgtacaagaggtcggacttaccgaacgggcggtgtacaactcgttgagcatggctgccgaacctgccgaaattgaggccgtgaaaaactcagacatcgacgcctccatcctgctgggtttcaacccaatgaatccaggcgtggcagggaaaatagagatctgggagacagggggcgacgttatcgacaaaggcatcctcgaaatggctgaagagtgtggaattaccaagccattcatggacgtggctgtcactcccttaggccagggagccggacccgccgtgcgcaccagcttcgccgtgaagtccaagtggggttatccagtaggaagcggcatccataacgtgccaagtgcatgggactggctgaggggctacaaaaaagagcacaaagaggcctggcctgtgtgcgatatcggtagtaacatcgttcaacagatggccgggggcgacttcgtcctctttggacctatcgagaatgcaagactagcattccctgcttgcgggatggcagatattatgattgctgaagccgcgaaggatataggtacagaacccgtggaagaccaccccatcaataagctgctgtga

SEQ ID NO: 9695 - DNA, 240 bp, synthetic construct
  source 1..240: mol_type = other DNA
atgagcgaggaaaatagcattccccaggtcatggtttcctcagacgagtttaacgatgtggtcgctaagctggacgccgcagaagagaaagtggatttcacggtgggcgagtattaccaacgcctgggccagcagacaggacgggacgtggggatactctacggcatcatccttggactcatgattctaatcgtggccatcaagttcggggtagcgagtatgttgtctaccctgctgtga

SEQ ID NO: 9696 - DNA, 207 bp, synthetic construct
  source 1..207: mol_type = other DNA
atggtgcagatctccaacaagccaaatataggcggaatgaaaacggccgccgatgacgctgaatacagcagcaagctgctggccagggaggggaagttgttcgcggggcttctcgcaacccggtttaaaggcttcgctatcggcatctgcatcgcaacactgctcatcgtcattattcccttcattgccaaggcggccggactatga

SEQ ID NO: 9697 - DNA, 717 bp, synthetic construct
  source 1..717: mol_type = other DNA
atggccgataaaaaagcccccgccgatggctggccggtgatttccggggactacatagtcggtgaccccgagagccctgtggccgtaacaaccctggccagccatatcgaggccgaactgagcggcgcagcgattgcaggcccatgcaagacagaaaaccttggaatcgaaaaggtggtggcaaatatcatcagtaaccctaacattcggtttctgatactggccggtgctgaggtccagggccacatcacggggcagtcctttaaggcactgcacgagaacggggccgaccccgacaaaaagaagattgtgggagcaaccggcgctattccattcgtagaaaatgtgccactcgagggggttgaacggttccagcagcaactggagatcgttgatctaatcgacactgaagatataggcgccattcagtcaaagattaatgagtgtgtcgagaaagatcccggagcttttgaggaggaggcgatggtgatctctgtcgaaggcgacgacgctgatgaggaagagggagaggcaattcgagtggtttcggcggaaactgggctcatcgaggcccgcatcagggacattaacaccaaaatcgacatggtcggcgctgtgcagagaaatatggccgggaactatgctggcaaggtgcaaggtataatgatcggacttgccttcaccctcatcatcggagtgctgttcttgttattctga

SEQ ID NO: 9698 - DNA, 330 bp, synthetic construct
  source 1..330: mol_type = other DNA
atggctcagatgctgccgatggtccaagtggtccctgaaatgaatttcgcatacgacccagtcagcggggttatcggaagtagcctggggagcggcgtcgttctcctctctatggatgaggtgaacgagcaggtggccaaggtggagttggcggccgacgagcttatggcgtccctagacccctacacaagtcccgtgggatcgtatcccggccgggaaggttcctacgtgaccgccggcctgctgacgaacatcgtatatggcttcctccttgcctcattcattatatttgctgcactgccaatcttacaggccatgggggtgctgtga

SEQ ID NO: 9699 - DNA, 816 bp, synthetic construct
  source 1..816: mol_type = other DNA
atgagcgcgggcggaagtgcagacggtgccgctgccggcgccgtggactcaatgcatttgctggtgctgggcatagttgggggattgctcgggatttacctgaccgcgttcctgggcgaaactatcggatcgctgttcgcaggccttggggccgtctgcgctattgtctggggggctgacgctatccgccgggtagctagctacggcctaggcacaggtgtcccatctataggctacatgagcctctccgttggtgtgatcagcgcctttgcagggatcagtttggctgccatcctgaaaatgccaatggtcggaccgatcgcagccctgctggtggctgtgatcattggcgcggtgattgcccttgtggccactaaaattgtcggtatgaagatccccattatgcttcagtgtaccatcgaaatcgccggggccgccgcactgtctatcctgggattctccgcggcaatagctggcagtttcgatatggccgcagtgtatgagaacgttgtggccacaggctttatcgctgtactctttattctctgcacgatggccatccagcaccccttcaatgcatgcctgggacccaacgaggatcaattaaggacactcaagtgtgccgcaagcacggcttttttatccatgactattgtggggctcatgtccatcaccaccggtggactggggtggttcattgtcttcatcgttggcctgatagggtggataatctcattcaaagcctttgtggtggcctctatgaatgacgccgctagcaccaagtgggcgggactatggcctaaggtagagaactga

SEQ ID NO: 9700 - DNA, 702 bp, synthetic construct
  source 1..702: mol_type = other DNA
atggaccccatcagtttaattttgttcatcgccataggcgggatcatgatcggggcaggcgtgcactttattcctgtcggaggagcgcccgccgccatggccacagctactggagtcggaactgggacggcaatgctggctgccggggccgggctgacaggtctgatcaccgctgcaacgatgacaggggagccattttacataatcgggatcgggggcgccataggcgccatgatcatgatgggtattacgatgctcatcgctaacataatttatatattcggcgtgggcatagttccagcagcctccaaggtgcctgtggactggatcacaaagcgcaatcaggaggcgtacaaaacccccggtaccgaaggccacggtgtgcccgttacctcctttgtgagcgggctgatcggagggctccttggcggcttcggcggcggactggtctactatggcattgacaccgccatcaaccagtcgagtttcgtgagcgatccggctgtcagcattggcctcgcggcgattattggtgtcggggtattcttcattaactccgtaatcgcttcatacaatatcggaggtactattgaaggcatgcatgatccaaagttcaaacggattggaaccggagctatcgcctgcgcaatcgcatctatcgtggtggccatcttttgtatcattctaaccggaggcatctga

SEQ ID NO: 9701 - DNA, 879 bp, synthetic construct
  source 1..879: mol_type = other DNA
atggaccccgtgacattaggtgtggtggcactgatgggggcagtggccacgatcggaggggccgccgaggacttggaaagcgatatcggtagccaatcaaacccgaactcccaagtgcaacttgcgccccagatgggccatctgcaccggatgataaacaaggcggcatccggcgagccagtcgcttacggcgtgtggtgcggggtggccggtgccattgcatatatcgtcatgtcgctgggcatgctaccgatcgtggctatcgcaatgggtgcctgtgtcgctgcttttgtgcacgctatttacactgtgacatcccacatgggaaggatcgtgggacagtctcagtttgagcagcccttgttcatggacgtactgactcagagcctgggccctatcgtgggccacggatttataaccagcttctgcatagtgggaatatcatacctgatgaccatcccaattaatggcaccgcactgcatgtgttccccctcccactcctggccatgctttgggggattgcgctcggtgccatcgggtccagcacgggggacgtgcactatggcgccgaaagtgaatatcagaaattcgagtttgggggaggcacccctgtcgctatccagggagatattgtgactaaggctcctatgggggccaaaaactctatggatgttgtaaacttctgcgccaagttcggcggccccctgaccggcttctgtttcgggctcgttgtcttctttagtttctggaatacagtcgtctttggagtttatggcggcatcattgtcgggattatcattgttatcctactcgttatcatggacaattacctggaggtatttgcccgcaaccagtacggaccatacgaggaggaatga

SEQ ID NO: 9702 - DNA, 1668 bp, synthetic construct
  source 1..1668: mol_type = other DNA
atggtgattaatatggctgacaaaaaattcctgaatgcaatgaaacaaaagtttagtgaagacccaaccgaaaagtcaacccagttttataacatgggtggttggactcaatctgaaaggaagaccgcatttgtgaacgaaggcaaagaaatagctgagaaacgcggaatccccatgtataaccccgacatcggtacccctcttggtcagcgcgctctgatgagctaccaactctccactactgatacgttcgttgagggtgacgatctgcacttcatcaacaacgcagccatccagcaggcgtgggatgacattcgaagaacagtcatagtagggctgaacacggcgcacaatgtgctggagaagcgactcgggattgaggtcacgccggagacaatcaccaattacttggaaacggtaaaccacgccatgccgggcgcagccgtcgtgcaggagcatatggtcgagacagacccactgctcgtcgccgattcatacgttaaagtgttcaccggcgacgatgagctggctgacgagattgacagcgcctttgtgttggacattaataaagagtttaatgaggagcaggctgaggctttaaaggctgaggtgggcagtgcggtgtggcaagcggtgcgcatcccttccatcgtgggaagggtgtgcgacggaggtacaacctcccgatggagcgccatgcagatagggatgtcgatgatttctgcatacaaccagtgcgctggtgaaggagccactggcgactttgcctatgcaagtaagcatgccgaggtggtgcaaatgggcacttacctgcctgttagaagagcccgtgcagcaaacgagcttgggggagtgccattcggattcatggccgatatctgtcagggcagcagggtttacgctgatgaccctgtgcggcagaccctcgaagtcgtcgccttgggcgccgctctttatgaccagatatggctgggcagctatatgagcggcggggtcggattcacacagtatgctaccgcagcatacacagataatgtgctggatgacttcacctactatggcaaagactatgtcgaggacaagtatggagatttgtgcgccgcacctaataacatggacaccgtgctagatgtaggctctgaggttgccttttatgccctcgaccagtacgaagaataccccgccctgctggagacgcacttcgggggatctcagcgggcgtcagttatctcggccgccgcgggctgttccacagccttcgctacagggaatgcacagactggcctgagcggatggtacttatccatgtacctacataaggaacagcattcccggctcgggttctacggcttcgatctgcaggatcaatgcggggccgcgaacgtattcagcatcagaaatgatgaagggctgcccctcgagatgaggggaccaaactaccccaactacgctatgaacgtggggcaccagggcgaatacgcgggcatcgcccaggccccgcacgccgcccggggagacgcttttgccttcaacccactgatcaagatcgcatttgctgataagaacctttcattcgacttcagtaaggtccgggcagaatttgctaagggcgccctccgcgagtttgagcccgccggggagaggactgtgattacccccgccaagtga

SEQ ID NO: 9703 - DNA, 759 bp, synthetic construct
  source 1..759: mol_type = other DNA
atggtgcagttttatccaggcacgtcgcaggttgctcaaaaccggcggaatttctgtaatcccgaacatgaacttgagaagctgcgagaaatcagcgatgaagacgtcgtcaaaatactgggccaccgcgctcccggagaggaatataagagtgtgcacccccctctggacgagatggatgagccggacgacatcgtaagagagctcgttacccctattgatggggccaaagccggagacagaattaggtatatccaattcgtggattccatgtacttcgctcctgcgcagccctacttacgcgcccgctcatacctgaataggtacaggggaattgataccggcactttgagcggacgacaggtaatcgaggcacgggagcgagacatcgagaagctgagcaagatcctcctggagaccgagtacttcgacacagcaaggacggggattcgtggcgccggcgtgcacgggcactctctgagactcgatgaaaacggtttgatgtttgatatgctccgcagacaggttttcaacaaggagaccggtaacgtggaaatggtgaaagaccagatcggcaaggaactggatgaaccggtggtcctaggggagccactggacgaggaaacacttaaggccaaaacaactatctaccgggtcgacggggaggcctaccgggaggacgtggaggcggtggaagtctgccagcgcatacatgtgtccaggagttttggcgcctatgacccaaacgcaggatggtga

SEQ ID NO: 9704 - DNA, 600 bp, synthetic construct
  source 1..600: mol_type = other DNA
atgataggacgctgcacgcacgtggtagactgcagggaaacatcggggatgggaaaggggggcagcctcgcccagcgcggcaccttcgctgagtgtggcaccgatgtatgcgccgtcgctatgtcccctggacggagacacataactaagccggtgtgcgagattaccttcgggctgcgtgagagcaacgttcttaccagtaccgtcgtgctcaacgccggtgcaggggttccccatgatgcgcccgctagcggcgggacattatttggaattacagaaaaggagattgaccaactgaataacttcaaattgctggtgatccaccttggtggcgtggccaaccatatcatctacaaggcacgactgatcctaaggaatgtcaataagccctgtgtgatcatctgcgagtccccagtggactgtgaggattttgcgaaaattggagtgaagaccagcaaagtcatgccagcagacgaagacatcaagactcagggcacgatcaaggacatcgtcacaggcgttattcggggtgaaactatttcacaggagaaactggacgaaatcataagaaaagtgaagctggccctcggcgatgcctga

SEQ ID NO: 9705 - DNA, 456 bp, synthetic construct
  source 1..456: mol_type = other DNA
atggacattgagatatttcctcatagaattttaggaagtgacacaacagaactgctccttaatgaactggagtctatcgatgatgtgcagcgcaccgtcatacacggaccaaggttccccaaaggcgaagcaaccttgcccgacaagtacaaagagcggagggtcataaacattaacggggaagacgtcgtgctgcaggtgaaaactgctcgcatcttcatcgagctcaccatggagagcacaatcaaggagattgaagaggtgtgcaagaagcatattccgttcggcttcgacatcaaccaagatcgggccaattacatccgtaagcacaaaacggttactgacagaatcaagtacggctccgccgatctaccagacgacctggtagggatgaccgaccagtattcagattttgagagccacgtgaatatcatcaagcgagacaacctggattga

SEQ ID NO: 9706 - DNA, 1332 bp, synthetic construct
  source 1..1332: mol_type = other DNA
atggcaaagtttgacgataaggtcgatctgtatgacgatagaggctcactgatagcctctgacgtcccaatcgaggctatcagtcccctgcgcaaccctgcaattcaaagcatcgtgaagggcgtgaagaggaccgtggccgtcaacctggagggagtcgagaagtccgttaagaccggaagcgttgggggagacaagtccaagatcctcggacgcgaactagatttagacatcgtgtcgaatgccgaggcaatttcggaaaagataaaaggaactatccaggttagcgaggatgacgacaccaaagtagagcctatcagcggtggcaaaaggctgctcgtccaagtaccttctcagagaatcgacgttagcgctgagtactccgtggccccgctcgctacagccactgctctggtgcaggctatcattgatgtgtgcgacgtcgacatatacgacgccaacttcgtgaaagctgctgtgctgggccgatatccccaatctgttgaatacaagggatcaaacatagcaaccatgcttgatattccacagaaactcgagggaccaggctacgcattacggggggtaaaggcaaacgattttgcggccgcgaccttgaagaatacattccaggctaccgccctggcatccatcttcgaacagacagctatgtttgaaatgggcgatgccatcggtacatatgagagactgcacctgctaggccttgcctaccagggcctcaatgccgataatatggtgatggacctggtcaaagacaatgcggcggaaggcactgttgggtctattgtgcaggccaccattgcccgagcagaggccgacggggtgatcgcgccccagaaagacttgaccgacttctccatctacaatacggatgatgccgcgaaatggaacgcctatgccgccgctggtgctgtagccgccacaatggtgaacattggtgcggcccgggctgctcagggggtgcccagcaccctgctttacttcaacgacaacattgaatttgccacggggctccccagtattgactatgggcgcgcagagggcgtcgctgtgggattctcattcttcagtcactccatctacgggggcggcggtccgggcctgttcaacgggaaccacgtggtgacgcggcatagtaaaggcttctgcataccctgtgtggctgccgccatgtccctggatgcaggaacacagctcttttcaccagaggcaactagcggtttgattaaggaggtctacagccagatcgatgaatttagggaacctattaatgcggtggccatcgcagccgaggagatcaagggggacatctga

SEQ ID NO: 9707 - DNA, 1245 bp, synthetic construct
  source 1..1245: mol_type = other DNA
atgcagattgtagcagacgtggggggaatccctggcaaggactgcaatgggttctgtaaatactgttactttaggaaagtcaagaaagtcaaaagctttgggtgcgcgtattgccccccgaataagataggctgtgaaaggtgcagcaagggcgtgagtgagacacaaagcgagtttaagtcaccattacaggttatgaacgaggtgcgaaattcgctcatgatgaacatgcacggcggcaaagtaacggccaacatcagtggtgggggagatattagctgttacccccacctagaaacactgaccagcaatctgaatcaaatctcaatccccagcgtgctgtcctatacttgtggaaagggcataaccaatagcgagattgcttcaaagctgatcaataacggagtcgaagaagtctcatttactatcttcagctccgaccctaagctgcggaaagaatgggttaaggaccagcaccctgaagaagctctgaaggcctgcaagatcttctgcgagaacatcaagctgacgggggctgccgtcatcatccccggtgtgaacgacggcgagatactccgccagacgtgcaatatcctcgaggagtggggtgccaagggcatgcttctgatgcggttcgccaacaccttcaacgaaggactgattcttggcaacgagcccattcttaaaggcattgaatcgcagcctgtggaagacttcgccgagctcgtcagacaaattaacagcgaatactccttcagagtgagcggaaccccattgtgtgaccctgaaaccggtgggccatttgcaatcgccaaagatgaaaatgagatcttcttacagtttatcaagcccattaccggagaggcaactataattacatccaaaattgccgcaccattcatctccaagatattcaacaagctagaggtggacagtgtgaacgtagtggcggtggagaaggagatagcttgcttgatcacaaaagaggacctggagaaactcgatttgaacgagatcaaggatgttgcgatcatcccgggacgctcttttgtgcatcagctggacgccgagcgcatccttagtgctgatggtattgagaggctggtggggcgaggcccagacaccctctccgttgatggggagctgagcattgacatgactgatgaaaatgtcatcgaaacagagctcgagcagttcaacgatctggcagatgccatcaacttctttggcatgcggagaatttga

SEQ ID NO: 9708 - DNA, 924 bp, synthetic construct
  source 1..924: mol_type = other DNA
atgtacgagacacttacctttactggtggagtgcacaagagcgaggagtttaaggagctgattgaggacctgggcggattcatcctgcaggaaaacattcaacagatggaactagtactcaacatggcggttcctctcgaggatgtggacaaggtggaggagaaagctaatgagctgcttgctaaaattagcatcgcgccaatggcagggtctgaaatagccatcgttagccccaccctcgccagacaccacctgcctcatgcggcatgcgacatctcagaatatttgcgggaatttggggcaaaggataacatgttgggccttgccaggggggacggcaagggaacgtccggaatcaccgaagaagaaaaagacttaattaacgagcatgatatcgctattttctcgctgggctcctttgaaaattgcatcaaggagaaggcattcctgtacgacgacatcgatataccggtgatcgtcaccggcgccccggacatccctgtcgaggagctgcccggcgccgacgcctatgtgggcgggctgggtcgaatccctagacgcctgaggcggggacccgatgtgcgtgccctcgacaaactggtcgagacatgtgaaaaaatcctgaacgataagaagcgggaaatggctctcgatccacccctggtgccatctatcgttgtcaaaaacgctattgaaaatcaggtgcgcgagattaaagacgtgttcagtcccgccccagtcacttcacagttagacggggtgcgcgtaaaattgaactacgatgattacgccgacgtcatatccaatgtgatcattgacgataaaaagctctccgagctagccgagataaagaagagcttcatgtacgactatatcctcgtaaagattaacagtgagagctctctggtggagaatagtaactga

SEQ ID NO: 9709 - DNA, 519 bp, synthetic construct
  source 1..519: mol_type = other DNA
atgaagatcgtgacgacacctatgtgcgaggaaattgtgaaactggcaggcattagcgactattcgataaacaagaacccagatgacgaaaagggggacttggccatcctcctgagcgagagcaacgtcaagatggatagtcttacaatcaaaatcaatactccctcacaggtgtttgagagtatcaaaaaagtgagcaagatcaccaagaatgaactctctgatgaagaggtgctggtcttttttgaagactacaggttatgtaaaaagtacctcaccagcaatttcaagcgcgacatcaatgtgaaggtctattccaactttctgaaggatatccttctggatatgggattcaacattgtcttcaccgatttcaagtacgtagtttacccggactacttgaaagacaaagttgtagagtccgagaatctggtggagattcagagccacgacaacatttcaaaaaaccccttcgagaagattgagatacggtattccatactagaaaacctgatctga

SEQ ID NO: 9710 - DNA, 684 bp, synthetic construct
  source 1..684: mol_type = other DNA
atgaaagttaccctgagctttgagaagagtgaatcctcagatgtctcaatcatggtggatgccctcagagcttcgtctaccatcacacttgctctaaataacttcgagaaagtgatcccatgtttcacacctgaggaggccttcaagctaaaggagaaacttggggggattgtggcgggggaacgggacggcaaaaagatcaatggctttgacctgggaaactcacccgccgatattaaggactatacaagcgatcacctcattctcacgaccagcaacggtactcgaatactggagaacatgaagagcactgtgctgataggaagcatcattaatgcttgcgaggtagctaataaatccattgagatcgccaataaccatatcgatgtggtgatggcaggagttaaaggcgaatttgccatcgaggacttcctggccgcaggcgagatcctgtactggattctccaggaactcccggactgcaacttaagtgagtacgccaaagcggcagtcttggcaagccggaattacgaatccctgaaggaatccttctttaactctaggtcgggtaagcgccttatcgaactgggctatgaaagtgacgtggagctgtgcagcttgaagaacatctccaacaacgtcgccatatacgaaaatcaggagctgaccttgctgaaggactga

SEQ ID NO: 9711 - DNA, 1173 bp, synthetic construct
  source 1..1173: mol_type = other DNA
atgaaacgcgagctgctgacaataatcggtacggcgcatgtgtctgaagaaagcgttaacgaagtgaaggacgcaatctatgagcagcacccagacattgtggctatcgaactggacaggggaaggtatgccaaaatacgaaataaaatgcatggtatcgaggaagatgacaatatctctgtgacccgcataatcaaggagaacaaagtgggactgtttctggtcagcactctgctgggatacttccagagcaagatcggcgcagaggtcgatgtcgacccgggttccgagatgattggcgctattgaagccagcaaagacctgggcattcccatcgccctgattgatcgtgaaatcaacaccaccttgcagcgggcattgaataagatgggcttcatggagaaggcgaagttcgcatatgggctcatcgctagcattctgggtttcgacaatgacgaagaggagatagatatcgaggagctaaaaaactccgagaacattgatgacatgatggagatgttcaaggatgaagcccctagtgtgtatgaggtgcttgtacacgagcgggacgcttacctggccgggaaaattatgcagataccatacgataaagtaatcgccgtcgttggagccggccacaagcctggaattgagaagtacttggacaaccccgagacattacccgatctgaaggagctcgagatcattaacgataaaaagggcatcccttggcttaagatttttctggctctaataccgattctgttcgttgtgatattctttctggcctactttaatgggataaacattactggaaatatctacgaatttatcgtcatcagtgtaattatggggttcatcggatcaattctcagcggttccaaaatccagtcggcaattgttgggggcatcgtggcgccactcacgatcatccaccccctccttgccgccggctggtttagcgggctaaccgaagccaagtacagaaaagtcaagcaatccgacattaagaacctggtgaaaatcgaagggttcaaggacctgtggaacaataatatctttagaatcctccttgtcgtgatcggcaccaacttgggcgtgagtatcgctacactcgtgatcctcccatcaaaggtgttcattcccttattcatgaagatctttgggggctga

SEQ ID NO: 9712 - DNA, 213 bp, synthetic construct
  source 1..213: mol_type = other DNA
atgtacttcatctttcggtgcgactgcggacgagcactgtatgcaaaggagggcgtagcgacacggaaatgtgtgtgcggcaaaaccatcaaggtgaagtccaggcgcatattccagaaggtcgctaccagagaggaagccagcctggccgtgcaggaaatgcaagacaagatttacgggaacacgggtttcatgaaagccagcgatctctga

SEQ ID NO: 9713 - DNA, 1320 bp, synthetic construct
  source 1..1320: mol_type = other DNA
atgatcgggacgacactcaaaattgtgataattataatcctcattattctcactggatacctgtcaatggccgagctggctgtggtctccatccgaaaggccaaaatgcagaagtacctcgaagatggaaataagaacgctcagatcgtgttcgacctcctggaagacccaaatgagtttttgtccaccgttcaaatcggcatttcactgattggtgttctgactggggcgtttggtgggattaccctggcagagcctctggcgaagataatctatttcataccatatagcgacatgattagtgtggtgttggtggtgctggtcacgacatacctcacattagtcataggggaaattgttcctaaagtcattgctctaaacgaccccgaaaaagtgtcgcttaaggtggccaagagcatggtcattctgagcaagattagcaaacccgccagctttgtgcttgccaagagctcctcctttctgctctgggtattgagaatcgaaaacaagaatgatgagatagtgaccgaagaagagatcgagctgatgatcaaggagggcagggaagacggaactatcgaaaaagaggaggaggacatcataaaacgggttttcaagcttgacgacaagaaggtggaaagcataatgaccccacggaatgagatcatctggattaacctggaggacagtagggacatcaacaagatcaagattgtggagagtaaacgttcgatcttcccaatcgcaaagggcgagctggacgatttcattggagtcgtgcaggccaaagacatcctgtcagtgatgttcagtgaggaggagttcgatatcaatacgatcataaaagaacctttggtcgtatccgagcacctagagaccttagaactgctgaaagagtttaaggaaaaccagggctacgttcatatgtctcttgtaatcgatgagttcgggagcgtggagggtttaattacactaaacgatttgcttgaaggtattgtcggggatattcctggaatcgacgaggaggatgagccggaggccatcaagcgcgaagacggcacctggctcatcgatggcagatacccgatcgacaagtttaaaaaactctttaaattcgaggaccccctgcccgacgaagaggaagacaactacaccactctggcaggctttatcctcagcatctccggcacaatccccgatgaagaggataagtatgaatgcggacgcttcatcttcgaaattatcgacattgatggccaccaaatcgataaggtgctggtcaccgatctggggccccaggaggacatcgaagaggagtga

SEQ ID NO: 9714 - DNA, 945 bp, synthetic construct
  source 1..945: mol_type = other DNA
atggatagcggaatcatcattcaagttgtattactgatcgtcgggttcgtctttctgatcaaaggctcggatatttttgtggacggctcaagcagcattgcctcgctgctaaaggtgccgacaatcatcgtgggtctcacgattgtggcatttggcaccagtgctcccgaggccgccgtgagcataatttcttctatcaacggaaataatgcaatggcggtgagcaacatcattggcagtaacattttcaacatacttatcatcatcggtgttgggacactacttggcgatctgctcatggagaaaaatgtgcttaaccgggacttgcccatcctcataggcgtgacattgctactgacggcgttcatcattattggatggaacatatccactattgagggtatcatccttctggccatcattgtggtgtacgtattttcactcatccattcttccaagaaggacagtcacgcacacgatgtcgataaaccaaagttgagcactaagaagagcatatccttcatcattatcggcctggtgggcatcattctcggtggagacctggttgtcaagagtgctagcactatcgccatctccttcgggatgagcgagaccctcgtaggcttgaccattgtcgctatcgggaccagcctgcctgaactggtgacctcactcacggctctgaaaaagggagaaaaccagctggtcataggcaatgtgatcggaagcaatatcttcaacatgttatttgtgctgggggcctcctccgccatctccgaaattccactcgactcaagtctgctcgttgacgtcatgtttatgatttttatcacactgctgtgcttcatattcgggaaaacccaggagaagtacgacaagaaagaagggattatattcatcgcccttttcattgcatatatggctttcgccatcctgaggaactga

SEQ ID NO: 9715 - DNA, 876 bp, synthetic construct
  source 1..876: mol_type = other DNA
atgtccaaactgaacaaagatgaatttaatgactatatctttacaaggattaatacattgatacatgactacgaactgatcagggagggggaactgatcgccgtcgcattgtccggcggaaaggacagcgtcctgaccctacacgccctcaaaaactatcagaaccaactcgacttcgatttagtagctattagtgtggatgagggaattgagggttaccgccagcacggcatcgattccgccgttagcaacgcgaatgagctgggcattgagctgatccaaaagtcatttaaggaggaggagggattcgccctggatgacatctaccaggacttcaaaagtgcatgcattccatgtggcgtgttccgccggaatatcctcaataaaacggcctacgagatcggcgccgtgaagatcgctactgggcacaaccttgacgatgagatacagtcttttctgatgagcttcgcccgaggggacaccattaagttctcaaaatttgggcccgagcttgacgtgatccaccccaagctggtgccaagaataaagcccctgtggaacacccctgaaaaggaggtcggaatgtgggctatcatcaatgacattaacatccatctggatgaatgtccgtattctcacttgagtctacgggctaagattaaagaatttctcaacgttagcgaagataagtaccctggcgtgaaaaacaacgtgatggaaagcttccagaagatactcaccttcgaaaatgacatatcggcaaaccttaacgagtgtgaattatgtggtgagccaacttcatccaacatttgcaaggcgtgcgagctcaaagaactgatctcccaggactgcgagagccatatctgcaataagtga

SEQ ID NO: 9716 - DNA, 306 bp, synthetic construct
  source 1..306: mol_type = other DNA
atgatcacatgcgactttgccatattgcccgtcggcaccgagactaccgagtgtaaggagtacgtgactgcagccgtccagagcatcaaggactccgggctgagctaccagctgaccggcatgggtacacaaatcgaagcggacgatctagaagagctctacacggccattgctaaggcacaggaagccatcttcaaacttggaattgggagggtgtatacagttataaaggtagacgatcgccgggacctggagaacagaacgctggatgctaaagtgagtaccgtggaggaaatgctcaaatga

SEQ ID NO: 9717 - DNA, 1107 bp, synthetic construct
  source 1..1107: mol_type = other DNA
atggtgagcaacataaaagtgcctattgccaaacccataattggagaagaggagatagaaaacgtggtggaggtgctgaaaagtggaatgatcgctcaaggcccacgagtggctgaatttgagcaaaaattcgctgactgggtgggagccaagtacggcattgctgtgaactccggaacagctgcactgcacgttgccctgctcagctgcgggattggggaaggggatgaggtaatcacaacgccatttacatttattgcaaccggcaatagcattctgtacaccggtgccaagccggtttttgccgacatcgacctcaagacctataccatgaatcctgagtccattgaggcactcataactgagcacaccaaggctattttacctgtacagctgtacggacagtcggccaatatggacaagatcaacgatattgccgaaaagcacgggttgatggtcattgaggatgccgcccaggcccatggtgccacctgcaatggtaggaaggtgggcagtctaggggacatgtcatgtttcagcttctaccctaccaagaacatgacaacttctgaaggtggaataatcacaacggacgatgaggagctcgcggagaacgctaagatattcagagcccacggtgcaagcgtccggtatcatcacgatgaagtaggctacaacttcagaatgactgatatctccgcagctattgggttggcgcagctggataagatcgatggcttcaacgacaaaaggatcaagaacgcagcctatctaaatgaagggctgaaagatgttgacggcatcatcaccccctattgcgcctacgactcaaagcacgtctaccatcagtacaccatccgggtggagggaaatcgcgacgactgggtcgacatcatcaacgagtgcggggtcggcacgggcatccactatcccatccccctgtacaaccagcccatctataagagcctgggcatcactggcaattgtccgcgcgcagaacttgctgccaatagcgtgatctcccttccagtccatccaagccttacaaaagaggacctggacttggtgatcgaggcggttaaaatggccagtgaaaaactcgcgtga

SEQ ID NO: 9718 - DNA, 1167 bp, synthetic construct
  source 1..1167: mol_type = other DNA
atggaggaatataaaatcaagactatcgaggaaggactgaccaagattgaatttccagaatttgacaaggtctcttcggacgctcccgtcttctacaatccccacatggagcttaacagggacctcagcatacttgcaatacaggtgttccagaaggaacagaagcgcgagatcaacatctgcgatctctttggcgggagcggaatacgaggcatccggtacaagaacgagatcgacggagtgggggagatttccatcaatgacatcagtgagaccgcaaaccactacgagaaacacaacataaagctgaacaatttagaagatattgaagtgtaccaacatgatgcatccatgtttcttagaatgaagcggggggaatttgatgtaatcgacattgaccccttcgggaccccatcccctttcctggattcatccggttattgtgccaaacgcaactccctactgtgcgtgacagccacggacacgtcggccctctgcggaacctataaagagccgtgcatacggaagtacaacgccaagccctacaaaagtgaatactgtcacgagaccggcattaggatactggctgggttcgttgccctcactctttcaaaatatgccaagtgcattgatgtcaaaatgagccacagcactgagcattacatgaggttgtacctggagatcaaaaagggctcaaaacgtacagatgaaaccttgaacaacattgggtatatcagccattgtaagaattgtctgcacagacagacgagcaacggcctcgcgagttctattgatgccatctgtccagtgtgcggtgagaaactaattcatgcgggccctctctggctgggccctatccagaatggagagttcatccagaagatgattgaggagactgagaataagaagatcaatagcgaaaaagaggctttgaaactgctgaataaatgccacgatgaggctaacgcgccggccacattctttgacatccacctcatctgcaaaacactgaagatttccgctcccaagttcgacttgatcctggacgaactgaagaaggaaggcttcatcgccgtgaagacccatttcaagccattaggtatgaaaacagacgcatctattgagaatatcaagaacatcctgatccaactgcagagtaagatttga

SEQ ID NO: 9719 - DNA, 477 bp, synthetic construct
  source 1..477: mol_type = other DNA
atggtcaaaacaaaggataatgtgatcaagctggacgacactgacatcaagatcctgaaaataatcaatgaggatgtgcgaacgagctacaggcagattagtcgcagcttagatgtatccgtcggcacagtgcacaaccggattgacaaaatggtcaagtccggagtgatcaaaaaattcagccccgtgatagaccatgaaaagctggggttcgtgctgaccaccattatcggggtgagagtaaagggtggcaagctcaagaattgggaagagaagaccttttttaacaagaatgtcgtgggaatctacgacgtgaccggcgaatacgacgcattcctgattgccaaattccgcaacacaaacgagcttaacgggtttattaaggagttgctcaaagatccaatcatagaacggacttatacccagacggttctagacgttattaaggaggatatgggctcgtcaaacatcctctga

SEQ ID NO: 9720 - DNA, 939 bp, synthetic construct
  source 1..939: mol_type = other DNA
ttggcagtgtgcctgcccgatacgcaggacgacgccccatctatccctataaagctgacgagagtcggggtgaccggagtgaagaaactgctgcagctggatcgcaccaataaacgccctataattctgctgcccacattcgacgcctttgtcgacttgcctaacgatcaaaagggagtccacatgtccaggaacccggaggctatcagtgaagtccttgaaagtgtggccaaagatccaacggtagacattgagtccctctgtgccaagatcgtggaaaagatgatgaccaagcatgagtacgctaagcgggttgaaatctccatgacaacagactacatgttcatgaaagagtcacctgtgaccaaaaataagactcaggagatgagcaagctgatagccaaggccattgggtttagggacgagaagggcaacattaagatccggaaaagcgtgggtgcagaagtgattgggatgacagtgtgcccctgtgcccaagagtctgtccgagagagcgataaaaacaagctcctggaatttctggacgaggagactacacagaaggtcctggacaccgttactttcgcgagccacaaccagagaggcatcggcaccctcctcattgaagtgccagaagataaaaaagtgaaagcggaggaccttatcgacattatcgaaagctcaatgagctcgccggtgtgcgagcttctcaaacgccccgatgagaatgccactgtgatgaacgcccatagaaagcccgtcttcgttgaggattgcgtacgaaacatgatggagaaaatcgctaacaagtacgctaacttgccagacgacaccctaatcacagcacggcaggaaaatcaggagagtatccacaggcacaatgcatatgctgaaaaggtaaccaccatgggcgagttaaagtccgagctagatatctga

SEQ ID NO: 9721 - DNA, 441 bp, synthetic construct
  source 1..441: mol_type = other DNA
atgaagaagagctacgagattgccggccaggtaatgggcttcttcgagagttttaaaggttcacgaccggcgattaacaatgatcggatactcatcgttcgcggaaggtcaaggaagatcatccctattaacgaatttgactccaaactgtccgagatcggagagattcttggggggaccgagctcaatgctagcagcgaaaagatctccgagatcttgcagtacggtgacaagaacatccaaaagagtgagggcaatacaaccagcatcgacgaacacggatttacgagaatgaaagatgaactggaatcgatggggctggtggtcgcatataaagtgttcgagctcctaggcttcgatgtggtcattgccatatgggaggaccggaacgaactgcccccactgtacgtggaggtgactgtcagcgagcatgaagactga

SEQ ID NO: 9722 - DNA, 1113 bp, synthetic construct
  source 1..1113: mol_type = other DNA
atgaagatcaagatgcagaacaaacttaacaaagaagatatcctccacattctgaatgccacagataatgagataatcaattatatgctgaagacggtgcagtacagggagaatcacctgattacttactccaagaacgtgttcatacctctaaccgagatttgccgcaacgactgtggctactgcaactttaaaaagaaatctgacgatcctgaggccataattctgaagaccaaacaggaggtgttggaaagcttgaaggaggccgagaagtacggttgtaaggaagccctcttcactttcggggaggatgctgacaaagaggaggttgtgaaactcaaactcgccgagtacggctacgaaaagatgatagactacatcatcgacatctgtcagatgactctggatgagacaagtctactgccccacacaaacgggggaaacttcagctttgacgatttgaagcgactgaaagaagtcaatgcatccctaggattaatgctggagaacacctcaaaccggctcatggagttgcccgctcataacaaatcccccggcaaaaatccgaagcttaggctcgagaccatatcaaatgcgggaaagctgaaaattccctataccacgggtatcctgatcggtatcggcgaaacaaaggaagaaattgccgaatcgctgattgcaattagagacttgtacgacaaatatggccatatccaggaggtcattatccagaacttcaccccaatcccgggcatagagatggaaaactggccagagcctagttttttagacatgatcaagacagtaattgctggaactctcctctttggcgacaccgacgtcagcatccaagtgccccctaacctgaacaatgaaaccgctcagatcttcctgctgtgcggggcggatgactgggggggagttagcccagtgtcccgggattatgtgaatatcacatctccctggccagggatcaacgagcttaagaaactgaccattgacgccggcttcaagctgacggaacgcctgtgcatctatgaaaagtacatcaatagcgagtggcttaacgataatctcctgaagaaggcatctaaccttagtaagcaccaatga

SEQ ID NO: 9723 - DNA, 729 bp, synthetic construct
  source 1..729: mol_type = other DNA
atgaaatacaaaaagatcggtgacatcctaattctggataacaaatactcagacaataattttgacgaattgagcaggaagcacaacgtgaaaacgatcatgaagatcgaccacattcagggcaccaaacgtgaaccaatctacaaaattctttacggggaggagaccgaaacaatccacagggaaaatgggtgcctgttcaaactcgacctcagcaaggtcatgtggtcgaaggggaacaacaacgagcggctgagaatcgctaagctggtggatgacgatgaaaccgtccttgacatgttcgcagggattggctatttctccattcccatcggtgtgcacagcaatcccaagaaaattatcccaatcgagataaacccaaactcctaccattttctgtgcgagaacattcggctgaacaagctcactaacgtgacgcctattctgggagattgtatgatgaagactcctaaattcaaggccgatcgcattctgatgggctatgtcaagacaacccatcattatctgaagatagctatcgacagtctaaataagggaggcatcctgcattatcacgagacagtgcccgagaagctcataaacacccggcccatcgagagaatcaaagcgcaggccggaaatcgagacgttgaattactcaaaataaataagatcaagcgctacgcaccgggcgtagagcacgtggttatcgatgccttgataaattga

SEQ ID NO: 9724 - DNA, 615 bp, synthetic construct
  source 1..615: mol_type = other DNA
atgaaagacaagatcgtagagggaacaacaaccgtcgggatcacctgcaaggatgggatcgtgttcgccaccgaacggcgcgccacgatgggaaatctggtggctcataaagtcgcagagaaaatatttaagatcgatgaccacatcgccacaaccatcgcaggttcagttggagacgcgcaatccctgatgaaggtgattggtgcagaaaccagcctgtatcagatgaggaacaatgacgagattagtgtgaaggccgcagccagccttactgccaacattctaagatcaggacccatgtatgtacagatcctccttggcgggatggacgaagacgagccatccatttacagcctcgatccggctggcgggatgatcaaggataattacatttccacgggaagtggctcgatcgtggcttacggggtgctcgaagaccggttccgagatgatctgagcgttgatgagggcctggagctggctataagggccatcagagccgctgccgagcgcgacacttactctggcaacggctttttagtcgcgaaagtcgacaaggacggcttcgaaatgctggacaacgagaaagtgaaggagattttggataagatatga

SEQ ID NO: 9725 - DNA, 1914 bp, synthetic construct
  source 1..1914: mol_type = other DNA
atggcttcagacattctggaagatatcaaaaaagagattttgcagaaactacctaataagattcaggtgtcgaaagtcgagtttgaagggcctgaagtcgtggtgtacaccaagaaccccgaaataataacagaaaacggcgacctcatacgctcgcttgcaaaagaactgagaaagaggataattatcaggtcagataaaagcgctttactcgataatgagtccaccataaataagattcatgaaattgtgcccgacggagcggagattaccgatatttacttcgataccgtaacgggcgaagtcgtgatcactgctaagaaacctggcctcgtgattggaaagtatggggtcacttctagaaacattgtgaagaataccggttgggctcctaagatactgaggacccccccaataagtagcgacatcattggcaagattagaactatccagaaaaacagcagtaaggacaggaaaaagctgctgcagcggcttggacggcagatccaccagggaagcaaataccccaatgactgggcccgagttacgagcatgggcggctttaaggaagttggccggagctccatgctcctgcagacacccaacagtcgtgtgctactggactgtggcgtcaacgtggctgcaagcgataataagaatgccttcccgtatttgaacgcgcccgagtttagcattgaggagctagatgcagtcatcatctctcatgcccacttggaccactgcggattcgtgccgtacttattccattacggctatgacggaccagtgtactgcacaacccctacgagggatctgaccactctgcttcaatttgatcacctggacatcgctcacagagaggggaaccccctgcctttcacatccaagcacgtcaaacaggccatcaaaaacaccattacattggattatggggaagtgactgacatctcaccagacattcgactgaccttgcacaatgccggccatatcctcgggagtgccatctcccacatgcacatcggcgacggagctcacaacctggtatatacgggagattttaagtacgagccatcccggctgctcgaacctgccaccatacggttcccacgtgccgaaaccgtgatcatggaaagcacatatggtggaaaggaggacatccaaccgtcccgaaataacgcggaaaaggagatgatgaagacaatctataaaacccttaagcggggtggcaaagtgctggtgccagtatttgccgtagggcgcgcccaggagcttatggtcgttctggaggagtacatgagacatgggctcatcgaggaagtgccgatctacattgacggcatgatctgggaagccacagcaatccacacagcaaggcccgagtacttatcgaaggacttgagagaccagatcttccacatgggccgcaatccattcgtgtcagacatgtttaataaggttcaaaaccacgaccagcggaaggaaatcgtggagagtcaagaccccgcaatcatcctgtccacatccggtatgctcactggcggtaactcagtcgagtacttcaaatggctctgtgaggatgagcggaacactcttatctttgtcggatatcagtccgaagggagcatggggaggcgtgtgcagaaggggtggaaggagatccctctggaggatgatgatgggaaaacgcgcattttcaatgtggagatggagattaaaaccatcaacggattcagcggtcactctaaccgcagacagctgatggagtacgttaagcgcctgaacccacgacccgagaaggttatcacctgccatggcgacccctataaaacggtggatctggcctctagcatccatcgcagttacaagatcgagaccaagactcccattaacctcgactgcgtcaggatacattga

SEQ ID NO: 9726 - DNA, 1020 bp, synthetic construct
  source 1..1020: mol_type = other DNA
atggtgacatatagcgagtcaggggtggacatcgatctggaagcaattactgtgtcaaaactggccgacaagctcaaatccaccttggagtgccgcgacattatcaccgacagtggccactacgccgcgctggtcaagctgggcgacaaggctatcgccatgagcaccgatggcgtgggaagtaagattctcatcgcagagatgatgaacaagtatgacaccgtcggcatcgactgtatcgcgatggtggtgaatgacattttatgcgttggggccgagccaatagcactcgtcgattacctcgctgttgaaaagccagatcctgagagagcagccgaaattgctgagggccttgtgaagggtgccaatgagtccaagattgcaattatcgggggagagacagcctctctgccaggcatcataaaggactttgatttggccggaactgggattggatttgtcgacatcgataagatcattacgggagaatcgatacagcccggaaacgtgctcattgggatcaacagtaatgggattcactctaacggctactccctggctcggaatgccatctttgacaaagggggattctctgtggatgacaaaatgcctaatggtgaaacaaccattggtgaggaactgatcaggccgacggaactatatgtcaagcccattgtagccctattcaaaaaagagtacaatatcaacggcctggctcatataaccggcgggggcttcaccaaccttcgacggttgaagaaaggtgtaggctatgagatcaacagccttcccgaggttcccgagatattcaagctgatctacgaacagggagtagacatcaaagagatgtacaaggtgttcaacatgggtgtcgggttcgtggtgatctgcgacgaggaggaggcgggaaagataatgtccactctggatgaatattgcaactgtcaaatcatcggcaaagtgacggatgatgagacaatcaaagttaagagctttgaaggcagcgaactggaatactga

SEQ ID NO: 9727 - DNA, 1032 bp, synthetic construct
  source 1..1032: mol_type = other DNA
atgatgaaaataatgatggacaatgagacagctctcgtgaaagagatactaaaggagttgggcgctagtaaggaggaccaggaacttgttgccgaagctacagtggatgccgaccttaaaggcttcacatcccacgggctcggcaggttcccacagtaccttattagcattaaggccggcacaattaacctagacgaaaatattaccatcgaaaaagaaacccccgccatggcactgattaacgggaacagcggctttggccaggccgtgtcctacaaggccatgcagatcgcaattaagaaggcaaaagagatgggtatcgcctgcgtgggggtccacaacaccaaccacttcggagtcactggattctacagtgacttggctttaagagaaaactgcatcggactcgtcatcgccaacacagacccggctatcgctcctatcggaggtaaggttccactgataggcactaaccctattgctctgggtatcccctctgacagttacattaccgtagatatggccacctcagtgacggcgcggggcaagatactggaatccaagcgcaaaggcctggacctgccagatggatgggccttagacgccaatggaaatcccacgaacgaccccgaggaggcgctgaagggcagcattctgcctttcgggggattcaagggctatgcgctctccctcctgatcgagatcctgaccgggcccttggtgcaggcaggctatgggcatgaagtgactgggaccgcatcacctgataagaattgcacaaaaggagacctgtatatcgtcatcgatccgagcaaattcggtgactttgatgagtttaaggcaaacaccgaggactttatctctcaagtaaggtcgactggggagaacatcccagtgcccggtgacctcgaagtgaagcgggtcaaagaggccgagacgaatgggataagcattgatgaaaagctgtacgagcaactgaaacgaatctgtgacgatctgaatatcgatcttgattcttacctcgaggagtga

SEQ ID NO: 9728 - DNA, 2370 bp, synthetic construct
  source 1..2370: mol_type = other DNA
atgtacaaatgtatcagtgcctataaaatcaagattattaacatcaaaaatatgactaattttacgaagaatgattcatttaaggaggagaataaggttatgaagctgaaagactcttatatcctgctgatcgcaatggcaatcttcctattgatgagtatcggcagcgtgtgcgccagtgaaatatcggccgacgacaccatcggcctagctgatgacggaagcgatgtggttatggacgacaagccaattgaaccctccaaccccacaacaccacacaaagtggacaccatgattgtgagtagcgacacggtatcgataaacgaaaaggaaaagatcaagagcatcgacttgaccgtcaacgataccaataaatctaaggtcattgcggggatcacagttaagaatttgacagtgaaggagggaaccaagacaatcaaatttgattacaataactcgaaggtcatcattaaagacgcgctggtcctcggtaagcacgatcttctggtcagctatctggggaatgagaattacacgaactcttccaagaacattgttctgaccattttcggaaactacacaatccaagcccccacctccgttgacgtaaactccaccaagattgttgaggtgcctatcaatgtgaccaacgggatcgatccaaaagaacttgtcaaagacgactttaatgtgacactgacatataaggatggaaacatcactaaggcaattaacataaccgatttccggatcataaataacaccataatattcaattatcccctcagcaggaatattactaccagcaccatcaccctggtttatacggctaatgagaccgtgaaatcaaaaaatgttacaataaaccggatttacaatgtgaaaattgaagggatcaacacgaaaaaccaatacaagaatggtaactttacattccgcctgaccgatatcgataacgccactgagaacctcaccggttttaagcttaacctccttatcgggaaaaacgtgataaaccagattacaggaacggcggacaagaacggtattgtcaactttaagaccagcaagatcttcggatacgacttcaataacaacacaatcgtcatcaagtacctcaatgtgggcaataacacggtggagttgaagtccggcgacaacgtgaagttaaccacaaacaaagtgaatctcactatcgaaaaggcaaaaatcaacattaccattgataaatacaacgagcagtatggaagtaacaagaatctgaccatcacggtgataaatgcagataacggggagcctgtgccgggcatcatcctgcatctgaacatgcctcagaccgccggcaagaactattacattcagactgacacaaatggcatcggcatcatatccgttaagggtctgattcctggaaagtacaacctgacggtcagcaacaatgacactgtcaatattatcaacaacaaggccagcagcaagattattatcacaccaaaacccgtgacaataaagattacaagcgggctgactattaactataacactggcaataccgccgccatcaaggtgactgacaaaaaggggaaaggcgtgtctggcgcctatgtgctagtccagctgtatactgggtcaaagtcagccaattaccttttccagactgacaaatatggcaatatcaaattcaaggcaccgctctcagtggggaagcacaagatcgtggtgagtggggccgtcggctacagttccagcaaggtgaccaagtatattaaagtcaaaaaagctaccgccaagatctccgcgccaaaagtcaccgcctactacaagcagggaaagtactttacaataaagctcattaacacgaaaaagagcaatgcacccatttatgctgccaaggtggacatccgagtctacatttcgaactacaagtactacaaattcaacggaaagaccggcgtggacggtaagctcaagctgtcaatcgatctcaaaccgaaaacatacaaggtggaggtgagaggggcagattccaaaaattacgctgctagcaaagtagtatccaaaatcgtagtggttaaggctcccacgaagctgtatcctgccaagttaactgctaaaaaaggcacaaataaatacttcaaagtgactgtaaagaacaccaaaaccaagaaagtgatccccggcgttaaagtcaagatcaaggtgtacactggtaagaagttcaagacctataccgtcaagactaacagcaagggaattgcccagtttaacgtaaaatcattgagtgtgggcaagcataaggcgatcgtctccagcgccaacaagtattgcatcgctaaatccgctaagaactacatcaaaataactaaatga

SEQ ID NO: 9729 - DNA, 1797 bp, synthetic construct
  source 1..1797: mol_type = other DNA
atgcagagaaacgtggttatcttagatatcgactatgtcacctacgagaacaagcctgtgatcaggttattttcaaaagacggtgataagaacatcatactgcttgacgatacctttgaaccttacctctacgttatggccgatgatctggataagtgcatcgatgagatccagaacaattttgacgtggtttgcatcgaaaaggtaaataagaaggacttccagattgagaaggagtttctcaaagtgacatttaatcacccccaagaactggcaaagaacagggacgccctgagagatctagagagtgtggtccagattcgcgaatttgacatcccattttatagacgatatctcatggaccgggacgtgattcccatgactgaggtcgtggcaatcggcgataagatcgacagctttctcgatctggactccaataagcaggacattgaaatcataaaacttacagatgagctgaaacgttcccccgactacccgcgagagtttcgtatcttgagcttcgacttggaggttcgcaacccccacggcatgccaaacagcgagattgatgagatcataatgattggcgtgtcaagtaacttcgggatcaaccaggtgattagtacgaagacaaactctgactgcagagacgacttcgtaaatcaaatgaactctgagaaagagatgatcgaggagttcgtcaagatcattaaggagaacaacattgacattattgtgggatataactcagacaactttgatttcccataccttaaagacagggctaaaatactgggaattgacctcgacatcggaatggacggatcggatatccgctttattcgccgaggatacgccaacgcggccagcttcaagggcctgattcatgtggacctctatctagtcatgcgcagatacatgacccttgagcggtacaccctggaaagagtgtactatgagttgttcggcgaggaaaaaattgatgttccgggggacaggatctgggagttctgggacaatggcggtgaagaattggataatctgttcgattactcccttgacgatgtggtgagcacactgaaaatcgccgaacagaccctgcccctcaatctggagctcacccggatcatcgggcagcctctgttcgatgtatcccggatggccacgggacaacaagcagaatggttcctggtcaagcaggcctattttgacaacgaggtcgtgcccaacaagcagggcgctaatttcgccaatagggcggcggccgaagataatgaagggggctacgtaagggaacccgagaaggggctgcacgagaacctcgtgcaattcgacttccggagcctatacccgagtattatcatctccaagaacatatctccagacgtgatgtatctgggggatgtggacaatgaagaggattacaatatatctcctgagcatggcctcaaattcaaaaaagaaccccagggcttcattccttccgtcatcgacaagatattgcaggaacggtttcggatcaagcgggaaatgaaggcaagcgacgatgataccgagaaaaaggcactgaatgtccagcagcaggctatcaaacgcctggccaatactatgtatgggatctacggtttcccacgcttcaggtggtatagcttcgagtgtgcaaaggccatcacgtcgtggggacgacagtacattaagtcatccataaaaaaagctgaagagtacggtttctatgccatatacgctgacactgacggcttttacgctaagtataaaaaaaaggataagagaaactga

SEQ ID NO: 9730 - DNA, 1023 bp, synthetic construct
  source 1..1023: mol_type = other DNA
atgggaatcgaaatcgagaaatatctgaactttcccgtgctgcttatctgctttctgctgatcacctcacttatattcatattccctgccctgaaaatgatcgtgctcggagctattttggcctaccttgtgcgaccagtagcgtttaagattcaaagcaagctgaagttttcctccgttagcatactaatcgccatggtgatcgtgctgattcccctgattgccctcgtcgggtatatctcatacgaactgtctagcgttgcttcaacgatgcttgcatctagttccactgcagatattaatgagtctatcctgaagctcatcacctacctgcatatcgacgttaacccgaatgagatttctcagagcattatttcgtcctttgaaacaatcgccagctacgtgatgaactacggggtctcctttctaggtaaatttgccaacctgacgctggacctctttatcttggtgtgttcggtattctatttcgtgcgggatggcgataattgccttaatttcattaaatcctttgtgcccgagggctcagtggagttttttgacaagaccgttgacaacatcaaagacgtgctgaagagcatattttatggccacttcttaaccgctgtcatcatcggaatcttcggatgcatcggctactccattttgggttacccgttcggcatcttcctaggggtcttgaccgggattctgcagttaatcccaatattcggcccctggcccatctactggactctgttcttcattgatgcgctcagtggaaactacccaagggccataatggtcttgctgttcggcttcttcctcagtactattgacatgtacatacgcccagctctcagcagccactacgcagacatccaccctctgatcttactcgtcgggttccttgcaggccctctggtatatgggatcgtgggtttcattgtgggacctctcattctgggcatcacatatacagtcctggatagttatagaaaggaatacctcatgcgggtggagtga

SEQ ID NO: 9731 - DNA, 801 bp, synthetic construct
  source 1..801: mol_type = other DNA
atgatcaacgagccaaagatcgtggaaatcacagatattattgatgagactcctacaattaagacgttcaagttcgactggaatatgaagagcctcggcaaaccgaaccccggggaatttgtaatgatttggaacttcaaaaatgaaaagccaatgagcattgctcagatcaatgacaacgaactggcgatcaccgtgaaaaatatcggcgagtttacctcgcagctgcatgacctaaaaattgggaaccagattggggtccggggcagttacggcaacggatttaacaactcatttgagggcaagaagatcctggcgatcgggggaggtgtaggaatggctcctatcaacgccatcgtcagcgacctgatcaagaagggcaataaaatcgacgttgtggccgccgccgtcactaaaaacgagctcctctatgctacttcccttgaggaattgggcgctaacgtccaccactgtaccgatgacggctccttcggatttaaaggtttcgccacagattgcacccggaatttactgcaggactcaacgtacgattacgcattcgtgtgcggccccgagataatgatgaaaggaatattcgacattctggaggaggcaggaatatccgcacaatatagccttgagagatacatgaagtgtgccatcggcatttgcgggcagtgttgcgtggacagtgaagggtggaggatatgcgttgaggggcccgtgttcgagaatgacaagatcaataagatcaccgaatttggtaaataccgacgcgatgcctctggtgtgaagtattga

SEQ ID NO: 9732 - DNA, 912 bp, synthetic construct
  source 1..912: mol_type = other DNA
atgttaaagacgaatatttgtggagtggagtttagaaatcctctcatgctggccgcaggcatcatgggaagtaatgccagctcaatgaactggatcttgaagtccggggctggcggggttgtttccaagagcttcagcttgaactctcaccctggatatgtgaacccaacaactgtagccgtggaggggggcatcatcaacgccatcggccttagcaacccgggggtggcgaatttcaaagaggaactggaaaaaatcgaaaggaagaacagcgtggtgatcgcttcaatctatggggccacccccgacgagttctcatcactggtctgcgaggtgcaggaactggtggacatgatagagctgaatatttcttgcccccatgcaatggacggctatggcgcttctatcggccaggactgcaatctcagtcataccattgtgagcgcagcaaaagatgcttcggatgtgcccatcatcgccaagctgacacccaacgtaactgacatcaccgaaatcgccaaaacctgtgaagacgcaggtgccgactgcctgtccctgatcaacacactcgggccgggaatgaagatcaacattgatgttgcgcggccagtgctgagcaataaatttggaggtatgagtggccggagcattaagccaatagctattagtaacgtctactccgtctacgagtccgtcgacattcctctcattggtgttggcggaatttacaactgggaggatgtggtggaatttatatacgcgggcgccagggccgtccaaatagggacggctataatggatgagggtgtcgaagtattcgaccacattaatgaggggctcgagcgcttcatgaccgagaagggattttcctcgatcgacgatatggtcggccttgcccaccgagagctatga

SEQ ID NO: 9733 - DNA, 615 bp, synthetic construct
  source 1..615: mol_type = other DNA
atggtgtacgaagacttgatctatcttaagataatagaactggtgtattgctgttgccttttcggatttgagatcatgagtgacggcagctataaagatctgaaatacgagctggaactgaaaaacgccgaaattgacgagctcaatatcgagctggagaataagaaggaggaaattaataagctgaggctgtacgcaactaaattgaaatacgagaagaagaacctcgaggataagctggacaccaagatcgattacgataaggcgacaatgagtgaattggatgacttaagcgacaaaatcaaagagaaggaggtaatcatcgaggacaagcaggaccaggtgcggtatctcagatccctcatcgatgattataagatccaggtcagcaacaacacggaaaacctagaaatccaactccgcaagatctcgaagacctacggcgagctgcttaaacagaaggactccattatcgagaagcaagacgagcagatttcaaacctactgaaatccaaggaggagataattaaatctaacaaaaccaatataattgggctgaagctccagaatgaaaagtaccaggaaatcattgacaaactgacaaagactaactga

SEQ ID NO: 9734 - DNA, 1152 bp, synthetic construct
  source 1..1152: mol_type = other DNA
atggagtgctacatcacgtacagcgtgaagggattcttagcctttaacagtgagaatgagttgatatccgaaaaactgttcccagaagacaagatcatcgaccgcctcgctgagatcgatgacaaaaagatcgtggaggaggagctcgagatcatcgaggaagtcagcagtgattatgatgagattatcattgagtcaaacaaaagacgttctgactacgataacgagaagataatcgtcaaaactcccaatcaggggggggaatacctcagaaacaactatgagaagtttaagctggatagcgaggagatcacctcgatttatcgaaatttggccatttacaagatcaagaaggaatcagcctcagaagataaacacctaatccaggccattaactccatcgacgagatcgatgaaagcatctctaagctaattgagagaattagagagtggtacgccctttatttccctgagatggatgtcattcataataacgagacctacataaaactcataagccaaaataagaccaaagaaaagattatcgaggccaagccggacgcgttcccaaacgacatcatcgacctggaagaggatataaatcctctggacctggaaattatgaacaactacgctaattctatttacgaactccagaaatccaggaagaatatcgaggactatattgacaagaagatggaatccattgcacctaatctgaaactgctcgttggcagctccctgggtgccaagctgatctcccacgccggcggcattaagcgcctggcagtgtaccccagcagtactgttcaaataatgggtgctgaaaaggcactgtttcgacatttgaaaagtggcgaccggccccccaaatatggacttatctatcagcacccgcaggtaaggggcgcaaagtggtggaaccgggggaaaatcgcccgcatgcttgctggaatgatctcgctggcggtgcggcgagacgtgttcacgaagacctttgacgaaaacgtggctgatgaattaacatcaaagatcgaggaaatagagaaaaataaccccttcccaacaaaaacaaccaagcggcggaacgaagagcgctccaaatctaaaaaaagcaagaaaaaggggaagaagaggaagaagaggaggtga

SEQ ID NO: 9735 - DNA, 642 bp, synthetic construct
  source 1..642: mol_type = other DNA
atgaatgtatatttcaaggacggcaacgtcgccactaagaacctcaatcccgggacgagcgtgtatggggaagaactcattcaggaagatgtggagtatagaatatggaaccctaggcggtccaaactctcagccgcactactgaacggcctggagaacttaaagctggaagacactagcaaagtactgtacctgggcgcgagtacgggtaccaccgtttcccacatttccgatgtcctaatcaacggacggatatacgccgttgagtttagccccaccacagcgaaaaaactggtgcaactctcgcgaaagaggtttaatattgctccgatcctcggcgatgcaacaaaacctaaagaatacctgaacatcgtcgagaaggtcgacctggtgtactgcgacgtggctcagccaacacagagtgagttgttcatgaaaaatatcaacatgttcgccaaggacaacgcacagggacttatcaccattaaagcccgcagcattgatgtggtgcaaaagccaaaaaagatcttcaaggagcaggagaagaagttgaaagagaaggggttcaaaatcatagagaaggtgaagctggaaccctacgaaaaggaccatatcgcccttctggtggagaagaatttttga

SEQ ID NO: 9736 - DNA, 549 bp, synthetic construct
  source 1..549: mol_type = other DNA
atgaagaataacgtgctgaaacgcagtctaatcatcatttcatttatattcctgatcatttgcgcattctcgtgtgtgaatgcacaggaagataacagcgacatcaccatgatgactctgagtaagggaggcattgtgatccactacccatccaattggggctacagccagtccgactccaattattccataatgagtatcagcaaactggactcagtggactccgcgggggtcggtcaggttaatataaacttcgagaaaaaggctatcgaaggcgacttctacacatacttgaacaacacctaccggagcatgcaaagggatagctccttcaacctcacctcgtcaggggaagtcatggtcagtaatattcatgcctacgagtatatgtatagcagcaaccagaacggcacggtgaaagagcacaaggctgtgtggtttgagaaggggggacaggcctacgtgatgctgtatagcgcccccgtaaacgattttgaggacaacctttatgtttttgactacatcctcagcgatatccaaattacatga

SEQ ID NO: 9737 - DNA, 726 bp, synthetic construct
  source 1..726: mol_type = other DNA
atgccaaatgatagggataagcttctcaagatcatggacagtttggaagttgattaccgctctggaaagataagtcccgagaaatatagctactttcggtccaaatacgaggacaagctgaacagcatcgacgcgaaagaggccacccaacggatcaggtccatgcagggtaagtcaaatcagactacatcaataaagagaagtagaaagcccaccaaaaacaaaaaagagaaggaacaggacctcgtgcagaagtacatcatcaaccctaagaagggcgacgccaagtataacaaaaaagagaagaagtcaatgagctccggaacattcaaactggtgctcctgctagtgctggtggttgccttcactgtgggcgtcggctatggggtctttaatctggatttcaacaacatttctgaaacaagcaccgtagctatggtgcacgacactgcattcccggatattaccgaagacattaaaaacaccacaaagaccacgagctcatctaacaccaattactcatctactagttataacgtcaagacaacggaggattctagcagtgacagcgactactcggacgggggccgaaatagcgggtcctccgactctacgtactccggaagtgattcgggttccggaagctccggcagtgactcgggctccggcagcgggtcatccagcaatagcggtgggtccgaaagcaacggacgcagcgatgagtga

SEQ ID NO: 9738 - DNA, 801 bp, synthetic construct
  source 1..801: mol_type = other DNA
atgcagattaagaacctgatgagcgagaatctaatcaccattgacaaagaccagaacctttccgatgcactcaagttgctgcgcaaacacaatatctcgcggctgcccgtcaccaacaataaagaactcgttggcatcgtgtctgagcgtgacatcgctaacaagctgggaagtagcaaatccgagggcatgcccgcctcacggtttcatatctcaagcgtgatggtgaaggatgtgatcacagtgctggaaaccatgcagctgggtgacgtagcggagcttatgttggagaacgggattggcagtgtccctgtcgtctctggggaggggatgatcggcattgtgagtaaggccgatttcgtcactctggctgttggaattgcttttgataagataaccgtcaaagagataatgacgggcgacgtagttgcagtttccccaactgacaggctaattcacgcgagaagactgatgattgacgcccacattggacgcgtgcctgtgatcgaagaggatgaacttaaaggcataatcacgagcaaagacctcatgagggccttcattgacttccgaaagaatgtgccggagaagcatcaaaaatcccagatcaaggaggtgctggtggaagacatcatgtcctcaaacccaagcagcgtgtctaagaaaatgagcatcagtgatgtatcgaagatcatgatcgagaccggattcaacgggctccccgtggtggaagacggtaaggtcatcgggattataacacagacagatatactgcggttaatcgccaagctcgaatcctga

SEQ ID NO: 9739 - DNA, 936 bp, synthetic construct
  source 1..936: mol_type = other DNA
atgaaagacaagacgtccataaatcgcaaatcaaacaccggcgcagttgaacatgtgacgaaggtgcacgaccgagagggggacataatggcccttgccaccaaggaggtgatctccattcctccgactaagtcgatcaaggacactgccaaggtcatgatggaacacgaatttcggcgcctgccaattaccgatccggggtctgggaagttgctgggcattgtcaccgtaatggacatattggacttctttggaggaggaaagaaattcaacatcatcgagaaaaaatacgaagataactttctggcggctatcaacgagcccgtgaaggagatcatgactcgtgatctgattacactaagcacaaaggtgtccatcggggacaccctcaagacaatgctggacaaccagctgggggccattccccttgtggatgcggatggaaaacttgccggcatcgtcactgagcgcgatattgcactgtctttagcaggcatggcaggtaaggagaccgtgcacgaatatatgagtcctaaagtcttcaccaccacccccggcacaccactcgagagtgcttgtaaaataatggtgaggaatggactaaggagaatcccaattgttggtggagaagctgacatcagcaaggccaacaaaaagctcctgggcatcctcacgagcactgacgtgatcaggtttctgaatgccaaggagttgttcgataacctcaacagcaatctggctagcgacgtgctcaaaatcacagtctcagagattatggtgaaggaccctattacagtagaacagacaatgacgattggggagctgtgccaactgttcgcggagaagaatatcggcggcgtccccatcatcaaagatgacgaaatagtaggtatcattaccgagagagatgtgttaaactccgttcggcgggcctga

SEQ ID NO: 9740 - DNA, 699 bp, synthetic construct
  source 1..699: mol_type = other DNA
atgaaagcaccagtgattgagatctttagcagtttccaaggcgaaggcctgctgatcggtgaacgccagatcttcgtccgattcgccggctgtaaccttaattgcaagtactgtgatactgaggacagcaagtcggagaaatccggaaaactcatgacggtggacgaggtctgccgggagatcaataagatcctcactcccgactgcaacaccatctcattcaccgggggggaaccgagtctgtaccccgagtttattagcgaggtcagcaagaattttaatttgaacataatgctcgaaaccaacgggacactgccagataatatcaataagattgagcagttagatgtagtttctctcgacatcaagctgcctgaacacttcaacggcaactttaacgaggatattctgcttaatgagattaagagcgtgaacctgctaagggagaagtccatatccgtgtattgcaaagtggtcatcctccccagcacaaaaatagaaagcttcaaggaggtaattgagaaactatcaaagaatatctcaaacaagagtaacctgaaaataatcatccagccctcgtcccctctgaaagactggaaggatattaacttcagattgtttgaatactctgaagttgtgggacagtatttcgacgtgtccaccatcccacagatccataagattctggacattgaatga

SEQ ID NO: 9741 - DNA, 516 bp, synthetic construct
  source 1..516: mol_type = other DNA
atgaagatcctggttaacggaatccaatcaaatttaaggttctcaagcgcccacgtcatcccgggccacgaaagctgcggattcatacatgggcattcgtacttcgtcgacgtggagattgagggcgagcggacaggaaaattcgagtttgtggttgattttaaagacgtcaagggcttcacgaaagagttctgcaacgaacttgaccacagactcctgattcccgtgttcaatgagttgatcgaatttaaggactttgacaaaaaaactgatagtatcgatggcctgaaggagaacaagaccatacagttcaagatcgacggtaagggctacagtattcctagcgtggattgtgtactcctcccactgccctataccagcgccgaggaactgtccaaatactttgctgaagggctggccgaaaagctgtccgagtcctatgacaacctaaagtatgtggcggtgtgcgtgaatgagggtattgggcagggggcagaataccgcaaggagctttga

SEQ ID NO: 9742 - DNA, 597 bp, synthetic construct
  source 1..597: mol_type = other DNA
atgtccatcatccataagcacattgacgaaatatttgaatacgatggaagccaaatcaatccaagctgggcatttcaggagttcggcgtgtatgggtcttcgattataacatggatcggtccggtaaacatcactcccgataacctgaaagacttcgccgatgtcggccttgagataaaatctaactacatggttaacttcatttgcgaatttttcgatcagcagcctcccaatatgcggattgcttatttaagacagcgcctgattgtcatgatctttcgagagatcctgaccgagtacggaattaagaccaagagggagggtgatgacattttcgtggacgacgggaaactctccatctcaatcgccagtatcagcctcagcagcgccaaaatccactttgcactaaacttggaagacaagggaactccagacgatgtggagacaattgggctcttcgacattaaggatgaaaatggcacgcaaatcttcaacaaagacaatctgtcagacctgatcaatgagaccgcgtcccggttcatcgatgagcttcagaccatcgagaacgacataagtaagacaaaggtgctgggctga

SEQ ID NO: 9743 - DNA, 1074 bp, synthetic construct
  source 1..1074: mol_type = other DNA
atggagcaggtccgcacacgggacttcatttacacatccgacgatctgtattttgccagcacaaattatatacatccagaggacagggtgatttcctttctgcgctacatcccagatccagaaggagacagggaaaaggatggtaagaaataccgaaaggtgggcagcgcagaggcttatgagtacctccgggagaaccaccccgattatctgtatttctgtgatgtgaccaacgtggaaatgatgggtgtgcccctcgataaggtgaagcgaataatcaaacctgaaaagagactgctaggtctgaaagacacattcgacaacggaggggaagtgaaaaaccccgagcttattgcaaaactgatggacgtggctgactttttccatttcatggccaatatcccttatgaccacctgggtatctcagggtccatcctgccgggactccagaagagcgacgtgtctgacttggattttgtcgtctacgggctggacaaccatagaagggccatctcggccttcaagaaacaccggggcaaggaagtctacatcaaggaagttgacaaacacatcacggtggaaggcataaccaatgattattgggactttgtgtacaataaaagaatgagcgatgaatccctgactaaagaagagtttcggtggtacgagaacagaaaggctaacaggggaacaatcaatggaacgctcttcgacatcctagcgacccgcgactacgatgagatcgagggcacttggggcgacacggtttatgagccccagggcattgcgcaaattgagtgcgatatcgtcagtagcctcggggccttcgataacccgagcagttacactattgagaacttaaagatcttggagggggtagaggcacctatcaaggagattgtttcattcacccacacctacgccggggaggtaattgatggagaacacataatcgccaaaggcaaagtagagaaggtcactatccagggcaaggaggactattaccgcatagttgtgggcaccacccgtgaaagcattgacgagtaccttaagcttaaggaaagtcccgcttga

SEQ ID NO: 9744 - DNA, 1479 bp, synthetic construct
  source 1..1479: mol_type = other DNA
atgagtgagaagaggatagagtggaatagtaatttcgccttcatgatggctatgatcgggagcgctgtcgggcttgggaacatctggagattcccaaatgtgctgtattccaacgggggagggtctttcatgatcccttacatcgtgtcactgttcttattgggcatcagctttgtgctagtagaatatgcggtgggttttcggtttaaaaaaagtattggaagaatcctcttcagcattagcaaaaaactcgagccaatcgcgtggtttatcgtcctcatcgtatttctgatcaccacctactatgtgtgcgtggttggctgggatctcatctatgttgtgctgagtttcaccaaggcatggggggcaaaccccgataccttctttgctagcaacgtcttgcaagcgacagacagcatctctgggatattccagattgtacccatcgtgcttgccagcgtgtttgctatctggtttatgatctggttcattgtgaaacgcgacttgaatgacggcattggaaacgttagcaagattctgctgcccacactttgcctgatggttgtgatcatcgtggtcttttcgctgacccttcccggcgcgtcgatcggatacacccagatatttacccctgattggaatgccctaactaacctcaatgtgtggctggcagcctttggtcagattgtcttctccctgagtctggggatggccattgcaatgacctatgccagctacttgccggaaaagtcaaggctgatcgactccgccgtcaccgtggcattctcaaactccgctttcgaggtgtttaactccattggcatcttctccattttaggtttcatggccttgtctacgaagatccctttcgaccagctcgtaactgagggaacaggactggcctttgtggttttcccccaggtcttcaacactatgggcccgatgggctcaattatcggaccactgttcttcatatgcatcctttttgcaggcattacctccgctatagctctgctggaagtggtcacatatgctatttctgaaaaattcaatatcgaacgaaaacggacggtgactgtgatctgtatcgtcggctttcttatctccaccatgtttgcaaccggcattggcagcacaatactgggagccttcgacgccttcctgaacaactttgccctgctcctcggcatcctgatcgagtgcataatcttcgggtggatttacgactttaacaagctcatcgagacgctaaacaaggattcacgcatcaaggtgggtaagacttggaaggccgtcattaagtacattctccccatttgtatagctgttctctggatacaaggcgtttactccacgattacaagctcggataatctgagtctgacaattatgggtatcctaactgtgatattaattgtattgccaatcgtgttcgccaaactgcctgccaagaatgaggattactacaaggtcgactga

SEQ ID NO: 9745 - DNA, 744 bp, synthetic construct
  source 1..744: mol_type = other DNA
atgggaaagctcgatgggaaggtcgcaattgtgaccggcagcacctcaggcatggggcgagactccgcaaaactcttcgccgaagaaggggccaaggtggttgtaacgggaagaaacgaggagagggctaaggctgtggtggatgacataaaaagcgagggcaatgaagcaatctacgttatagctgacatggccaatgtggacgatatcaaaaaagtgttcgacactaccatggaggagtatggcaccgtggacatcctattcaacaacgctgggctgctgagtgtcacgcccctgcttgagatgactaaggaggagtgggataaggtcttcgacgtcgatgtgtacgcggcattataccttacacaattggtggcgccggtcatgaaggaaaagggaaaaggtactattattaacacatgttcagtcgcctcctatgcggcccactttggcttcgtgggttacattagctcgaaacatgccatcgccggcctgacaaagagcatggcttttgagctcgggcctgaaatacggtgcaatggcatcgcacccggggctatccacaccgcaatggttgatagtattggtggagtagaagccctgcagatgatggtggacggtgccccaatgaagcgcgtagggcagggagaagacatcgccgccctggccttgttcctggcttccgatgagagcgagtttgtggacggccagatcatccggtgcgacggcggatttgagtgctga

SEQ ID NO: 9746 - DNA, 795 bp, synthetic construct
  source 1..795: mol_type = other DNA
atgatcaatctctcttccatcaaaatgcacatgtactgtcccatgagtctgtacctaaaaacccatgttgacattgacgagaatgacatgtacaattgttatttggagatcaaaaacctcaaaattgatatccaggacctgatgcaaaagaatatcagaaaaatcaagagaaccatgagtctggaagaaattgagaagatcctctctcagaatatttatgagtacattgaaaacacaactaaaagcatgaagtctagcaacatcgagatcacttcagagcagattagcgagataaacgacgagacatacttcaacatcaagatactgagcatcaaatcaaaaaaggccatgaccatcttgaacaaggacgggttcggcattacagaaatgttcttccccaattgcctgtattcctacttaattaaggacacccagctcgagctgatcgggatatgtgataagatcgagataattgacggacgatattacccaatcagcattaagagctccaacccgcccatcaagggcgtgtgggatcaggatgcaatagaactggtagctaatgccatcctgcttgaagaggagtttgatacggaaatctttgtgggattcgtcgactataaaaagattggcgaccggaggcctgtcatcatggatgtgaaccttcggaagagtctcttttccgtgatcagggaagtgaaagagataattgagaacaagaagctgccaaacatcaagcgcaactcgaaaaagtgccgcaactgcgaatacgagaatatttgcatgaagaaatga

SEQ ID NO: 9747 - DNA, 660 bp, synthetic construct
  source 1..660: mol_type = other DNA
atgaacgactacacactgacgatcaaatctgatgagaaaaagggggtactctacgatatcactgatgtcatcacagcctatggggccaacattagttatgtccacctgttcgtggagaagaacaacatgggctccattaatcttgagctcgaacacgtggagaacatcgaggacctcataaaggacctcgagaagatcaaggaaataaaatccgtggaattgcacggatcacagctggacatttacggtaagcgcataatcatcatcgggggaggcgcacaagtctctcaggtagccatgggcgcaatcaccgaggccgacaggcataacatacgcggcgaaagaatcagcatcgacactatcccgctggtgggtgaaaagtcactggctgaggctatcgaggctatcagcagacttcctcgagtgagcgctttagtgctagccgggtcgctgatgggaggggaaatcacacgggcggtgaagaaagttaaagaagagagcaatctgattgtcatttccctgaatatgcccggcagtgtgaccgactacgccgacctcattatcaccgatccaattcaggccggagttttggcggtcatgagcattgcagataccgcagtgtttaatattaagaggctggatggcaacatacggttctga

SEQ ID NO: 9748 - DNA, 264 bp, synthetic construct
  source 1..264: mol_type = other DNA
atgaagtttgtgatgcggccgtatcacataatcagcctggggggctacattgtagagtgggatttcccctatagaaacctcattgtcgtgaataaaaccagcgaaccaatcaaaattgagatccccgtcttcaacgaggagtggatacaggagcatcgcgacctgggactggacatcatcccagtgaataagtacgataactacctctccatgtggaaaaaggcacacgccgaactagacaagatcaggcctaagaacgaatga

SEQ ID NO: 9749 - DNA, 999 bp, synthetic construct
  source 1..999: mol_type = other DNA
atgtattcaaatatactgacaaacagcatcgtggccgtaattctgaccgtgatcgtttgttttgtcatctcgacactactccccggcattgaacggaagtatgttcatgcacgaatccagcagcgtgtgggccccctggtctttgccccgggtattatggctccactgaagttcctgttcaaggagaatgtggaggttagcagccctgtgccaaagctgtacaagatcttgccgattttatgcttcattgtgattctgtgcgtcttcattgccctcacccctcaggcgtacaagatccccgccctttcatccctcgtggccatcgtggggtttctgaaggtggaagaaatatgctatgtgctaatgggagcactcagcaaatctgtaatgagcgtgcgcatgccgttccccgaccggatcaaaggcgcagcccacatcaaagcgcctctctcatttatcgaagacatcagtgcaaaaaggtcgctgagaatgatcacttacggctccttccccttgtacctcgccctgtttgctcccgtcacggctgcccgcagtattttcctgaaggatatagtggcattccaacaggtgcacgggcccttcctgtttaccgtggctggtggaatcgccgcgattgtgttttttatcggctacatgataatcctcaacgagtatccattcagcattatcaaggccaaaagcgacgttatcgagggaccctacatggagtatgctgctaagtacaggtccatcgtctttataaccagaggcttcttcatgtttgtcttggggtctgtcttctccgtattgttcattggggtgccacctagtatcttcagcctgggaattttagtgaacatcgcggttgcccttattttcgtctttatgatgggaattttctccgcctttgccccagtcttcaccaacaaacagctactccctacaatcctgggcacgactctgcttggtatacttgctatcgcactggggctcctgtga

SEQ ID NO: 9750 - DNA, 1131 bp, synthetic construct
  source 1..1131: mol_type = other DNA
atggacgaaaagctgccaacaaacaacataattgagacagagattccgatgggcaccgtgcaccccgctgcattggagccctataaagtcaggttcttcgttgaagatgagataatccaggaagccgaaatcacaatcggggttaatcacaggggaatagaacgcattatggagggcctgcctgttcagaaggcaaacagcctcaccgagaagatttgcggaatttgttctaattcacatatatggaacagttgccggaccgccgagatcgggctcgacatcgagattcccgagagagctacttacattcgtgtcatcatgggggagcttgagcgactgcattcccacttcctgtacctcgctcacggttgtgaggtgctagcacacgagaccttttcaatgagagtgttctacctccgggagatcgtcatggaactgctggccatgatcggcggaaaccgggtgcagtatggttgctcggtgttgggaggcgtgcgccccagatgtgaactggacgctaacaagatacagcgacttaaggacgatatggacaagctcgagggggggctgtccgactttgcggaccgctttgttgccgaccctatcgtgctgagccggatcacgggcgtgggagtcctcccccaaaaacaggcgattaaactggccgtaaccggcccatctcttagagctacaggcatcgcacgtgacctgaggactactatgttcgaatacgataattttgactataatatcgtaacacaacaggatggggatgtcaaatccaatctgctaatgcgcgtattagaaagcttcgagtccattaagatcatacgacaggccatcgcgaacatcccggatggtaaactggtgaacaatgactgggatatggtggacactgaggacattgctgaaagttacatcgaagtgccacggggcaccctctaccacagctacgcattggagaccgggagaatccgccattgcattatccggacccctagcatggccaacatcggtgccatgcagtatgcctgcatcggaaaccatctgacagatggccagttatgcatcgtgcaatgtgacccatgcttcacgtgtacggatagggccattgaagtcattaggaggtga

SEQ ID NO: 9751 - DNA, 447 bp, synthetic construct
  source 1..447: mol_type = other DNA
atgggaatcaaatccttttcaagagcaagggcaatccatgtcatgctggtttacaccggcggctgtaacggatgcgacatcgagatcgtcaacagcatattatccccacggttcgatgcggaacagtataacgtgttcctgacgtggaatccccgagaagccgatgtgctcgtggtgactgggcctgtcacccacctgaatcggaaacctctcgaggcaatttacgatgctattccgaatccaaagctcgttgtagccgccggcagttgcgctctgatgggtggggtgtacaagaactgccacggagacataccttctgaagagatcgagggcccggtcgacaagattatccccgtggacgccaaggtaccaggttgtgccgtccgcccccaggatgtgctggccggggtggtgagccttctacccacactgttggacgcggactga

SEQ ID NO: 9752 - DNA, 492 bp, synthetic construct
  source 1..492: mol_type = other DNA
atgcggaacctgatcaaaatcgctctcgaaggagcgtttacaaactttaagcgcatcttcttcgcagccgacagagtgacagacatggacatgaagaagcagatcgcaacgctgagcgtggaagtggatgacagggttgacgagagtgcctgcattggctgttcggggtgcgctaatgtctgtcccaccaatgcgattgtcatgaaaccactggcccatcccgtgaagttgactgagggatgggtgaaggatcaggtgcctgagattatccttgagaagtgtgtagtctgctactattgccacgatttctgtccaatattcagcctctacgggcaaaagggcgccatccacccctcctgcgttggcgatcaggaggtcgatgtgagcgaatttctggaacagccgttcaaaatatccgatgacaaactcaaaattatcgcccagtacctgtcagacaaaaccgtactaaagaacaaggaggacggtgactga

SEQ ID NO: 9753 - DNA, 1407 bp, synthetic construct
  source 1..1407: mol_type = other DNA
atgtttctgaccacgagcacctgcgagggcaagagggagtgtattaatcagtgccccacaaaagctattaaatttattaacgggagggcctttagttgcctgacctgtggaatatgctacaagaactgtccaaacgacgcaatattccaaaatagctacggggggtatgtcgtagaccgcgccaaatgtaatggctgcggcatgtgcatgtacaactgccccacaaacaatattacgattgaagacggcattgtatatggtatctgttcccgctgtggcgtgtgccatgaagtttgttcaaaccgggttgacgggtatgaactggaaaaagataaacagttaaacctgatcagatcactccaaatcctcaatcctccattgaacgacgtgccctacaagaaggagagcgaaactaaggtcgtcacccggaattacttcggcactgatgtggagaattgcatcctgtgtggcagatgccaggagtactgtcccacgggcgctatccatgtcaagatagactgggatgaaggaatttgcagcggatgccgcctatgcgaggatgtttgcccgaatgacagtatgaacaaacaccagatcgtgaataagaaatcttgtactctctgccttaattgcatgaaggcctgccctcataacgcaatctccgttgaggatagctcaattgtggtcaacaagctcaaccagaaacccaacggctcgatcatcagttgtctgaattgcggcttgtgcgcggatttatgtgaaaacgagtcccacaagaaggtggacggaaaactgcgatacgacccaacactggacatggagaacgtgaaccacgacgtggcgatcagtcattgccctgtgcacaccttgactgaagatgacgagatgttcatctacgacgagtttaatgacgaggagctccccatactgtccggattctgcgtatcctgtggaaactgcgtgcaggtgtgtaatgagtatggtgcccggcagtcgatgacccagagctgggacgggaaggtcagcgaggattgcatttcttgcgggatctgtgctgaagtctgccaggaggaggcaatcacacttcacaggggcagcatctctgtcgacctcgacaagtgtatactttgtgaaaactgcgccgtgcactgtccagtggatgtgattcctaagtctaccatgtataaaaacgaaatcaaagatggattcaacttcatcgaacaaaagctgtgcatgcactgtgggctgtgttataaaacctgctcatacgatgctatcgaaaagattaatgacgagtttgtggttaatgaggaaaactgtacatactgcggtgcatgcaagaacgcctgtccggccagagccttcctgttcgagcgaaactttaaggattccctagagggtatctga

SEQ ID NO: 9754 - DNA, 252 bp, synthetic construct
  source 1..252: mol_type = other DNA
atgatgctcagccttgggccaatcattttcggaataatcctgggtgtgattattggcagccagatcaagctgaaatgttgcgattccaatttcacgtggacctcatttgtcataatcattatcgccggaatcatcatcgcctggcagtccggcaactatccgttttacacagacttgcccatcagcaccgcatttgtgtcggctctgatagggattttcgtaggcaaactcctattcgcgcggagtaagtga

SEQ ID NO: 9755 - DNA, 477 bp, synthetic construct
  source 1..477: mol_type = other DNA
atgtcccagtccagtattatcctgaaattagtctcgctcccaattagcatgatactaatttgcctggggatcatgacaatcctgggcgggcatatcacccccgggggcgggttccaaggcggtgctatgatagcaggcggtgttatcctgagcgtcctggtgtatggcctggataatagcccgctggagttttcacacctttacattgaagtcctggaatccatcggggcactcggattcatcatccttggactaatcggcttgttcgtaagtggattcttcctgtacaacgtgggtaccgaccttttgaacgtggtgccccctacgatccagaacgttctccactatcccgacgtgactaacgcgggcatcattccatacctcaatatatttgtgggcctcaaggtctttgtaggactgtcagccattgtgatcgccttcgccggatttaaaaagattacagaggagagcaagtga

SEQ ID NO: 9756 - DNA, 282 bp, synthetic construct
  source 1..282: mol_type = other DNA
ctctcgagtcacacaaccgtgcggaatctgatcgcgtcagtcatggcagctatattctccgtgactctgcttgatgccgtatttcatttgagcagcatgattaatgcaggcgtgtccaacatctacaacgtgctgggaaccaaaatcgcccccaacatggtcacagtggtcatttttgacttcagggcctatgacaccctaggcgagagcattatcctgctgacggctgggctcgtggttctccttatcttcggacgcggcttactgggggacaagcagtga

SEQ ID NO: 9757 - DNA, 336 bp, synthetic construct
  source 1..336: mol_type = other DNA
atgagcctgtacgacaagatctttgatgtggtgaagcagttccggaagttgttttcccccgggcctgtcaccaacgcagacgtgtccggcagcattaccgccgaaatattcctgatcgtgtcacttgtgctagccacgatactgttgaggcacattagtgtgctgctcgcaggactggttatcttatttgtagctgttgtgctcatcatcaacattccactgatcccgaagttcaaaatcgagcaggaggattctctcgacaaaatgctcttctacgccattgtcacactggcgattatcggcgtagtcatgtattggggtgggaatcttgtctga

SEQ ID NO: 9758 - DNA, 1455 bp, synthetic construct
  source 1..1455: mol_type = other DNA
atgaacgagctaattccactgatggtgattgtgccactgatggccgccttaattattagtgccttttcaaagttcaacaaagccactaagattttcgcgtttgtcattgcgatttgcctccccttaattcccctgctgagcaattatggcctccactactttggcggatacgagccgattctagataatgtgaccaacgtcgtgtatcaccctgcaatcacatacagcttcacattcttccagcagatattcatcgccatgatcggacttttgacatttctggtggtatttgtctatctaaccaagtacaaagagatttcgggcccttatttgttcctgctgttcttaggtaccgcagcggtgactgccatgattctgaccgacgacatatttcacatgtttgtctttttcgaaatcttggccctggcccaggttgggatagtggccgcctcatccatcgactacagttacgaaatggctctgaagtatatgattttgggaagcatcggcagtccgataatgctgctgggaatcggattcctgctggccctcacggggagtgtaaacattactgatatcgtgacggccgtgcacaatggtctggtgaacgccaaatcgcccgtctttctactgtccctcggacttatcttctttggttggctttacgcctctggcctccccccattccatactatcaagagcggaatctactcaaaagcagaacctcatggcgcagctctgctgcaatcatttacggtgatttccatgatctccatcgtactgatcatgtaccgcatctattctgtcctccccatcttcgaggtgctcatcgtcttcttcagcatcctggctatggtcttgggggtttccctcgcactgacccagaccgacttcagaaggatgattggattcctggctgttggtgagctggggttcatcgggttagggattggcctgggcacgaacttcgcaatcactgccggcctgttccaggccctaaacgaaatcataatcaccgcacttctttttatcggcttcggtgcaatagttgaggcgacaaacgaagtggatacacgaaagctggggggtcttctggcttaccacccaaaggtgagcatcatgctcctcatcggggggttggctatggcgggagtgcccccgctctccgggtttcagagcaagctgatgcttgtgcaagcttctctcagttgtggcttccctgagctgtccatattggccattatggtcagcattgctacatttgtcgtgttcgtcaaaaccttctataccatgtttctgaaacccaagccagtggaattggacgttgagaataaggaggtgcctcgggctatggtttttgtgatgggcatacttctgattatcatcgtgctcctcggcctcttccccaatctgatcatccatggaatcagcagctttgtaggcggcatactctga

SEQ ID NO: 9759 - DNA, 387 bp, synthetic construct
  source 1..387: mol_type = other DNA
atggcccaaacccagctggccatactgttgacttccgtggctctcgtcatagtcggactttactctgcaatttttattgacaatatcatcaagaagataattggcatcagcttcatcgaagaaggggccaacctcttcatcgtggccatcgggtataaagcaggcggagtggtccctattatcatgccggggatggacacaagctggttcgcttccaacgcggcttacccactgccctttggtttagtacttacgagtattgttatcggcgcatcgaccctggcggttatgctcgccctggtgatggtgctgtacaaacggtacggcactctgagcaccagcgtgatgctagccgatacatcaaagcaggaggagtatgacgagtga

SEQ ID NO: 9760 - DNA, 234 bp, synthetic construct
  source 1..234: mol_type = other DNA
atgatcgagtttatcttatgcctgataacagttctgagcgctattctcgcgctcatccagaaggaccttctgaaagcagcaattctgaccggattcagcggcggcgccctggccgtacttttccaaatcctgttggcccccgatgtggccctaacgcaggccatagtgggggccgcaattgtcccagtgttcatcgcgctcgctgtcaagaaaacccagcgggtggacaactga

SEQ ID NO: 9761 - DNA, 423 bp, synthetic construct
  source 1..423: mol_type = other DNA
atgatggagtacattcagagcgctctcctcatcatatctgctattctgaccataattagtgccataggccttattagcctggacaagaacacaaaggatgtggtttatgcgcgcatccacatcgtgggggtgttcgacatcgcttgcgtcattgcaatgattgccatcgggcagtacctgctcgccggcatttacttcatcctagcaccatttatcgcccatgcaatcgccaacgcgtattggaaaaaagaggaccgggagaacaatctggatctgcagaatatcggagaggacgtcggtgaagaccacccctttctgcacccgaaagagaagatccaagccttagaatgtgaggattccgaaaagttcaaggtggacgagaggttctcagtaacgaccttggaaatcgaagaggatgagtga

SEQ ID NO: 9762 - DNA, 267 bp, synthetic construct
  source 1..267: mol_type = other DNA
atggacatcctgttcgtcagcaattatattgtggtgattgcactcatgataatgatgctcgcggcattgcgggccagcgcctacgagtccacatctatggggctgctagggagttcaattgtggtaaacgccttcgccgtcgccctgcttatcatcggtggattatacaacctggaattttttagggatatctccctggcgctgatcttcttcggctttgtgggcaccgtggctttcgctgtcgttctcggcggagacgacgagtga

SEQ ID NO: 9763 - DNA, 315 bp, synthetic construct
  source 1..315: mol_type = other DNA
atgttcctgacccgaattggatacgggattatctatttcctggacctgatttacgaaatccttaagtcaacatttgatgtggcctttaatggcatcatgaggcgcaatatcaacccggtcgtcttcgacattgaaacggtgttggagagacccgtgagccagaccatactggcaaactccatcagcctaacacccggcactctgtctgttgatctcgacagtgaaaacaacattatcaaagtagcgaccatctccccacggaagaaggaggacgtgatccctttcgagcagtacataaagaaaatgctcgagtga

SEQ ID NO: 9764 - DNA, 966 bp, synthetic construct
  source 1..966: mol_type = other DNA
atgaatctggtcgagaagctggaaccgataatcatcttttctgccgtactgattgggattttggccagcaacattaacatcgctcagcacaccaactacctcatcaacatcttcctttgtttaatgatatacggactcttcctggaggtgaatcttaatgagctgaagaatagttttaggaatattaagttcaccctgaccagcctaatcatcaacttcatatggacgccattattcgggtactggattggttcaatttttctgaatggcaacctagacatcctaattggcttctttatgctcattatcacgccctgcaccgactggtatctggtgtttacaaagcttgctaaaggcgatttgaatttgaatctgagcatcctgcctctgaacttaattctgcaaataatcctcctccccatctatcttataatcttcttcagcagtaaaaacagcatcgactacacacaaatcatttattccattctcataatcatcataatcccattcatcacagcacagatcacaaagtttgtgttgattacctcactgaaggaacgggcgattaacataatctccgatctggaaatttggtttctgagccttgccgtgttttgcattttttctagtcagggaaaacagctctttgagaatctaaacttcctgatcaccatcttcctgccactcatcatcttctttattgtcaactcgctggtggacctcctgatctcgaaaaagataaacttcacttatcccgagtacgtttccctcactatgacgacactggcccgcaacagccccctggccctggctattgcgataatttccttccagaatcatgagctggtctccatcgcacttgtgatcgggcctttgattgaactgcctatcttgtacattatcagcaaattctgcctctggatcaagaacaccaagctcttctcatttcacgattacactatctga

SEQ ID NO: 9765 - DNA, 705 bp, synthetic construct
  source 1..705: mol_type = other DNA
ttgagcagctataaggggcactctatatttgcatttctcctcgcgtgcatgttcttccacaatccactgctcatctcactgacgttgatcggggcgaacattcccgactttgaccataagttcaagaaggacaatgtatataagatgatcatcctggggttaatcatttttatctcactttatatccttaaactcccttactacatcggtctgatcattgtgttcctcggcatcacattttacttcagcgagcaccggagtttcacacacagcctgttcggcgtgttgaccctgactgctgctgtgagtcttatattgatttgggccctgcagctgatcaccattgttaccacattaaacaaccattacctgatcctggccatactgatctccctgctgagctttctgttcctgaacaaaaaactgctaatggtgttcctgcccatattcttcatttctctctttgtcatcaaaaccggagatattgcctatactgagatagtgctcagtctattgctgggcattttttcccacattgtgcttgattccttcacgccatcgggaatcaagcttttcgccccgctgtccagcaagaaagtctacaaaaatttcggcctaaccgtcatttttatcctcgccatcctctccattttctatcatgcatcaagcctctttaagctgtttgaaatgtacatcaagtactga

SEQ ID NO: 9766 - DNA, 741 bp, synthetic construct
  source 1..741: mol_type = other DNA
atgcatctgaagaagatagggcagtttgaaaatctaaaaatgggctacatcagcgacttctccggtggttacatcagccgcaataaggacatcttaaaccacctcgaattgtcgtcacttaatcagtttattttggagaagtctgtgtacggcacaccaattttcaaacttgggaatggcggaaagaagatactggtgctaagcggaatccatgggaacgagctgcctccgcagattgccaatgtatatctcatcaatgagctgctcaacaaaaagctgactaacacggtgtatctgatcccttttgccgctcccaagtcgtccatgaacaatgaaagaacctttaacgagcttgacctgaaccgagcaagccacatcaagaactcagtcagtaacctgatcatgcaggccattgaacagctcggcattgtcgccgtgggcgatttccacagtactagctttaactcaaaccccggctgcgagtccatcttcagctccaaaagcccctcccccgagagtttcctgatggcaaattacatttcacggaacgtggggtctgagttgatcagcttcgacttcgctggctccatgtacaaaggagcgatcgaagatgtttgtaacctgaatggaatcccatctgtgacctgcgaggtcctgtccccattcggcaacgttggtagggggaccgtggagacatctttcaatcaaatgataagttttctctcttatttcggaatttga

SEQ ID NO: 9767 - DNA, 1923 bp, synthetic construct
  source 1..1923: mol_type = other DNA
ttgaagaagtacatcaagagactgatcagactcgttaactatgagcgtgatgctgaaatcgaccttatgacacatgagataagtacaatgtcgggtaagaagcgagaggagctgggaagggcaatcaataaggtgaaaggcaagatcataggcaaagagctcggtctgcagatcgtgcaattcgggcgctctgagaggattgaaactgagatctctgtgggagacatggtgttgatctccaccgataatcccctgaagagcgacctgacgggcacggtgaccgaaaagggcgccagattcataaaaatcgcatttgacaagaaaatccccaagtgggcgatgaagaagaaagttcgcatagacctgtatgccaatgacgtgactttcaagcgcatggaggataacctcaggcatctgaatttgaggggaaaggatgcgctagagtatattctgactgaacgagatccgcgcaagaataaacagatcccttacattgactacattgataagtctctgaatgattcacagaaacaggcgattaagaacgctctgagttgtgagaacttctttctgatacacggccccttcggcacaggcaagacccgcactctcgtggagttaatttcacaggaaacacggcagaaacacaaagtactggctaccgccgagagtaacgcggcagtcgacaacatcctggagagactaatgaacaacaagcaactgaatctcaccagacttgggcatccgcagagggtctccgagcacaacatcacgcagacgctggcctacaaggttgagaagcatgagctgaacaagaaaattaaaaagattcaccggaaaattgagaaactcattgaaacccgtaatacccacacacggccaacaccccagttccggcgcggctacggcgactatgacatactgcataacgcttccaaaggtaagggcggtcgtgggattagtcctgagaagatgaagtcgatggccagttggatcgagtgcaaccaagagattaacgaaagctacgacgacatcaagcgcgtcgagaacaaaatgattcgcgatatcatcgaatgcagcgatgtgattctctccaccaacagcagcgctgctctggattccatagccaagactaaattcgacgtggccattatcgacgagtcatctcaggccaccatccctagcatcttaatcccaatcgccaaagctaagaggttcatactcgcaggggaccacaagcagctccctcctacaattatatccgccaaatcgagggatcttgaaaagacattgtttgaggagttgatcaagctttatccatacaaatctcaactactgaacgtccagtaccggatgaacaaggcacttatgaaattcccgaacaaggaattttacaacaatggattgaagagcgacccaagtgtagaggagatcaaaatagatgacctactcgaccacaatcaccacgaggaagccttgcttttcatcaacaccagcaacgtctacaataataaagaaaagcggctcaaggattccaaatcaatcatcaatcccgtagaatccgaaattaccatcaatattgtgaaaaattacctcgaaagcgggatcgataacgaagatatcgggatcattagcccatatgccgaccaggtgaaggtcatccaggacaacacgcccgttgaggtcaagactgtggatggatttcaggggcgggaaaaagaaatcattatcatctcaaccgtccggagcaataacaacggaaacatcggctttttaaaagacctgaggcgactgaatgtggccatcacacgagcaaagagaaagctgatcatagtgggaaacaaggaaactctgaaaaactcccccacctataaaagacttattgaatttattgagaatgagaatctgctcattgacctgtga

SEQ ID NO: 9768 - DNA, 1179 bp, synthetic construct
  source 1..1179: mol_type = other DNA
atgacggaaaaggtcgtactcgcgttcagtggcggattggataccagcgtttgtgtgaagctcctggaagaaaaatacgacgtggaggtgataactgcctgcgtcgatgtgggccagggggaggaagaaatggaaagagcgaaaaccatggcttctaagatcgggggcctaaagcactacaacattgacgcgaaggatgagtttgccaacgagtacatcgcacgtgccatcaaagccaatgccgagtacgaaggatatcccttgagtaccgcccttgcccggcccctgatcgctcagaaaattatcgatgtcgctgagaaggagggggcaaccgccattgcccacggctgcactggaaagggcaacgatcagttcagatttgaggcagtgatcctggcgatgagcgaccttgatattatagctccaatcagagaactgaacttgacacgaactgaggagcaggagtatgctgcctcgaagggaatcgaactcagctccgacaagctgtactccattgatgaaaacatctggggcaggagcatcgagggggacatcctcgaggacccctcaaatgagcctcctgaggagatctatgcctggaccaagagctggaaggattcaaatgacgagccggaaaaggtcacaatagagtttgaagaaggtgtcccagtggccattaacggcgagatgatgccgttgatagaccttatacgcaaggcaaatgagatcgctggaaacaattcagtgggccgggtggataccatcgagaaccgcatgattggtctgaaaagcagggaaaactatgaagttcccggagctaagctgttaattgcagcccatcaagctttagaggagctagttctcaccacagacgagctcaggttcgccgagtacatgtctacactttatgctgacctggtctaccgagccctgtggcaggagccactgcgggaagacctggatcaggcattcgacaaaatgcaagaacgggtaagtggggaggtggtaatgaagctcttcaaagggtccatccagcccctggtgcgcaaatcccctttcagcctgcattccattgaacagattacgtttgaggacaaagaaacggaccaaagggaggtggagggcatgatcaaataccacggtctgcaggccgcaaattaccagaagctgaaccgctga

SEQ ID NO: 9769 - DNA, 726 bp, synthetic construct
  source 1..726: mol_type = other DNA
atgtccaagcttaaccagttacaagagattattgattcgtctgacaatattgtctttttcggcggggccggcgtaagcaccgagagcggaatcccagacttcaggtctgaaaacggcatattcgagagtctgaataaatatggcaagacccccgagaatatcgtgtcacatagctactacatcgaccacacagccgagtttttcaagtactataaggacaatctggttttcaaggatgctaagcccaaccctgcccacatcgcgctagctaagctggaggaaattggcaaactgaaagctgtagtgacacagaacatcgacgggttgcatcagaaagccgggagtaagaccgtgctggagctacacggcagcattcaccggaattattgccagatatgcggaaaacagtatgagctcaattccgtgctcgaatcagacggcatcccaaaatgcgaatgtggagggactataaagccggacgtggtcctgtacgaagaacctttgaacagtgcagtgctgaactttagcatagattacatctcaaacgcagataccctcatcgtcggaggtacttctctcgtggtttaccccgcagccagcctgatcaactattttaatgggaaaaatcttgtgctgattaacaagtccgagacacaatacgacaacctggcgtccctcgtcattaacgatgccatcggtgagacgttctcccagatcaagatctga

SEQ ID NO: 9770 - DNA, 717 bp, synthetic construct
  source 1..717: mol_type = other DNA
atggactatgtgaagggaattttcaagaaccggcccaataggttcatagccgaggtggaagtggggggcaacttggagatagcccatgtgccaaataccggtaggtgcaaggagcttctggttgatgacgctgtggtgtggctcaaggttgccgacaaccccaaacgcaaaactcggtttagcttgcactttgtagagaacaagaatgtgctggtctcgctttactcccagcaggcgaatacaatcgtgtacgacgccgtcattgagggcaaaatcaaggaactgaacggttactccatctaccagagggaaaaaactattgataactcaagaatcgatatctatctggagaatgagaccgaagaatgttacgtcgaagtcaaaggagtaacactgatcgttgacggggaggctcgatttcctgacgcaccaaccgagcgcggcagcaagcacctcaaagagctgataaaactgaagaaggaggggaaccggtgcgtggtcttcttcctgattcagcaccctgtgggaaagttctttcgtccaaactgggaaaacgacccgaagttcagccaaacgctaaatgaggcatatgaaaagggcgtcgagattctcgtatacagatgcgataaccagctcgatgggatcaatctcatccccgaagccttagactttgatctgggaaaaagtttcaccgacggcatcgtgaacgacaagtga

SEQ ID NO: 9771 - DNA, 1527 bp, synthetic construct
  source 1..1527: mol_type = other DNA
atgatggtgacggattacaactgtgaatatctgggattgtctcggctttgtctgatggaaagcgccgggaagtcgctagccgaagaagtggggaagattgctgtatacacattcgccaagccgatcaaagtcgtcatcttcaccgggtccggtggcaacggtggagatggcttcgtcgcagccagatacttgctaaataggggttatgacgtggacatctacatgctgaaagacaacatccgctctgaagacgcaaaaaccaaccttgagatcctcaagaatatgaagccccgactgtccagactgaacattttcaacctcaaaacactagatgatatcaataattgcgaggtggttagtgacgaaactagtgatttcataatcgtggactgcctgctcggaactggcatcgacgggaatttacagacgaatattaaacgggccattgaggtaattaatgagtctaacgggcttaaaataagtgtggacgtgccttccggcatgaaccccctgaccggggtggtggacgacttggcggttatcccagactacaccatcagcttccacaagatcaaaacaggagtcaggaacgctgatgaggaagcggttggcgggataataaccgccgacatcggaatcccatttgaggcggagtattttgtgaactatggggactttctccgcctcaagaacagggattctgactcacataaaggcaacaacggacggctgctgattgtcggcggatctgcgaactatagcggtgctcctgctatcgctggcatggctgccatcggtgccggcgccgacctggtccatgtggcagcacccgagaaagccgccgaagctataaaggcgacaagtcccgacctgatcgtgaactcccttgagggggacgagttgtcactggaacacggcgaggagataatcagattaagcgagaacgtagatgcaattctgatcgggcctggcgccggcatatccgatagtaccagcaaactgtttaacctgcttgtagcaaagatcaagaagccgatcgttctggacgccgatgctctgaagcaagttgagctgagcctgattcgaaaccgtgaggatattattctgacgccacacatttttgagtttaaatcattcttcaaggtcaagaatgacttgaagttagatatcgattcatacgatttcaagaaagttgacgagaatatcaccgaaatccagtttatcactaaccagattaagggaacagtcatcgtgaagggaaaatacgacctcattttgtccgaaaataacttcaaaatcaataagagcggaaatagcggcatgactgtgggagggaccggcgacgcactctccggtattgtggtcagcctctccgcccagggcctgaatgctttcgatgccgcctcgcttgctgtgttcattaatggcctcgccggcgaccgcgcattcgacgagaagggaaatgggttttcagccacagatctggtgagctttgtgggtaacgtgattaaggatggcctctgctga

SEQ ID NO: 9772 - DNA, 1134 bp, synthetic construct
  source 1..1134: mol_type = other DNA
atgaggaaaataacgatccgcctgttaaccaggttgcccaccaagtatgtgaccatcggcctactcctaattatcgccctgtttgtgtacggaatcttagggtcgtatttcatcatgcacctgaatattatcgatagcatttattactctattattaccatggctacggtagggtacggcgactatacaccccacacaggaatccagaagatctttgccacaacacttgccctgtccggtgttgcccttctcgcttatgtgttcaatatcatgttgacatcattccaggaaaagatgagcacctattccaaaggtgcccggaaaatgaaaaccatcgaggatatggacgactactatatcatctgcggctttggcagagtgggcaaggtggtctttgacgagctgaacaaacgcaagcagaacatcattgtcattgagaaaaaagaagagatttgtaataatatcgaggagtccagctcggtcgtgagtattcacaaggatgctagcgaagacaatctgatatcaaagctggcgggtgaacgctgcaacagtgtgatcgttagtactggagatgacgtgaacaacctcttcatcgtcctgactatccgggagacaaacccggacgcgtggatcgtgactcgagcctccaaagtggaaaacattcctcggcttaagaaggcaggggccgataaggttgtctcccccgagataagcggaggacaagacatgttcttcgaaagcactaacccttacctgctgagaattacagtcaaacacacggtagaccagatatacgacgaatttaaggtgatcaacaagtacgattgcagcctggaaaccattgactaccacatcccaggcgtggagaccccactcacccgtgaaatatatgtaacccggctggcagacggcaagaaatactacaactacctccagacacatgatgatcagcgacaagcacttgacaccttgtacagaactaccaataacatccattcacatttgatcctcgggcaggataaggagtctttcgagaacctgataaaggatctgaaggagatcgaggaaattattgggattaacctcacgaatgaggagatcgctaaaataactaggaaggaggactctaattga

SEQ ID NO: 9773 - DNA, 891 bp, synthetic construct
  source 1..891: mol_type = other DNA
atggagataaatggcgtcgaaatcaaagatacatacgctgaaggcttcggaattaaagtgacccgcattttggtgactgccgcaacggaagaattggccaagatcgccgccactgaggcaacagggtatggaacgtctgttatcggatgccccgcagaggcgggcattgattgctttgttcccgccgaaaatactcccgatggaagaccgggctacgtgattatgatctgccagggcgggaaaaaggcactcgaccatgaacttatggagcgagtgggaatgtgtatcctgacagctcctaccgccgctgctttcaactgtctggaatcggaaaccaccttaaaaaccggcaacaaactgaagttcttcggtgacggttttgagaaggagtgtgagatcgacggacggaagatccacagcattccaataatgagcggggacttcctggtcgagtccgagtttgggtataaggacggtgtggcagggggcaacttctttattctcgccaaggaccagatgaccggagtagaggccgcgcaagccgctgtggaggccatctccaaggttgagggcgtaatcacgccattccctggcggcatggtggcttctggcagcaaagtgggatcaaacaagtacagtaaattcctgaatgcgtccaccaatgaaaagatgtgcgtcacactgaagggggaggtggattcagacatcagggatgatgccgatggtgtatttgagatagtgatcgacggggtcgacgaggaaagcgtcaaggccgctatgaaggcgggcatagaggcagcctgcgaggtggacggcgtcctagaaattagtgctggtaactttgacgggaaactgggggcctacatcatgaaccttcaggagctcttctga

SEQ ID NO: 9774 - DNA, 1062 bp, synthetic construct
  source 1..1062: mol_type = other DNA
atggacaagaagtcagtttttttcctaggaataagtgtctttatattgatcataatgctgtggttggtggggatagaggacattatcgatgcgctgaatgtcgctaaactcgagctcatcgcgctcgccattggcgtccagatcttcacatatgccctctacacgctccggtggcagatacttaataacctagcagatatcaataccagcttcaaaaagctgctgcctatgattctggtagggctggccgtcaacaacatcactccatcgggccggggcgggggcgagcctgttcgagcatatatcctgtctaaagaggaagactacccgatgcgcgagacattcgctaccgtggtcgctgatagagctctggacactttccccttcgtggtgctgaccgttatcaccatcattggtatgactttttactttaatttcgatttatggttacttatcgtaatgatcagcgccgtaatctgcatcgtggcctttttgctgatgatcatatacatgagcatcaaccccaacttcggcaaacgcgtcgacggctggatcattaagctcgttagaaggttctacaagaagaatagcgaggaactggaaaacaaaatccacgcagtgatccttgacttccaaagcacaatgaaaatcgtgatttcaagtaagaaggtcacatattacgcattgcccctgtcatttatcatctggattttcgaaattctgagggtgtatatcgtctttctcgcctttggagcggacattagtcctattgtgattggggaggtgttcattattgccagcctggtggggatgatcccactgcttcccgggggactgggtgccgtggacggaattatggtggttttctactccgtggcaggcataagtgcttccatatccgccgccgcaacggtgatcgagcgtcttatttccttttggatggccaccattctcggcatgattatcctaccacattatggatcgagcatcctcgacaagattagcttcggttcctccaacgatgaaatcgaggaagctctggagaacgaaatcgataactga

SEQ ID NO: 9775 - DNA, 1434 bp, synthetic construct
  source 1..1434: mol_type = other DNA
atgcgctacattaccaagacggacctgttggttatcggtctgaactccggatacctgctgattggcatcggcataatgtgcctgatcccactgatttttgacctgatttattttgagttcgacctgattagctttattctgcctggcgctatatcaatatgcctcggcttctttcttaccaagtacctcgatgaatattcaaacaagaatgtgcgactcaagcacgggatgatcatctcctcacttggatggatatgggccgctctcattggcggattagtcttcatgctggccaccaacatgccccccattgatgccatctttgagagcatgtctgccctaaccgggactggagtgaccatgtacacaaatcttgagatcctgcctcatagcatactcttttttagagcgttcgaacaatggatcggggggctgggcgtggtcgtcatggtgatcagtgtgctggcaaaaccgggtacggctacctcgacgttatatcacagcgaagcacacgatgagcggataaaacccagtacgaaggctaccctggagaaaaccattgagatctacataatctacaccgtggtaggaatcgttctttacgccatcgcgggcatgccactcttcgattccctatgcaataccttctgcatcattagcactggaggtatgaacgtgaagaatgcaaacatgggctattaccataacgacttgatttatttcatatccatcgttcttatgatactgggtgccacatcctttctcgtacattataaggtgatcaagactaagggcaaatccttgttggaggatttgcagtttaagattattatctgcgtgattgcaattgtcacgttgatgctctattacgtgagcaacatcgtcccgatggaacttttattcacagttgtatcagccatcactactacaggggccagcatctccagctctctgacaatggcgagttggccatcttttgtgatcatctgtctgatctgtctgatgctgtcgggcgggagcaacggttctactgtgggagctattaaactgatcaggctgatcaccttcttcaagggaatctaccggaacatacgggagatcctgtcccccagtgggagggtggtgcccatcaaactccagggcaggccactccctgagaatgcctcggaacagtctggtaattacatcacactttatctaatgttcatcatgtttacatgggccctgttctgtttcttcggccacgacccctttgacagcttgttcgcaactgtctcactgcagggcaacaatgggctggacctggggattattaccaaccagattcaccctgtcctcaaaatcgtcagtatgctcaatatgtggatcggaagactcgagatttacccagttctaatcacactgcgcaccgtgttcgaaattttcaagcgttga

SEQ ID NO: 9776 - DNA, 660 bp, synthetic construct
  source 1..660: mol_type = other DNA
atggattacgtcgtaatcatgggcggaggtcgggtagggctggctctggccaacctgttaatcaatgagggatatgacatcactctgattgaaagtgatacgaagttgtgcgacgaagtggcatcagagctcgatgcactcgtgatttgtggcaacgggaccaattctaaaatactggaagaggtgaacatcgaggacgcaaagtacttcattgccacaactggaaatgatgaagccaacttgctttcatgcatccttgttagaaaatacaacgtggagcatatcattgcccgcgtcagcaatccggaccacgaggaggcgttcaaagaagtgggcatcgaacaggtcatcagtccagaacgagccgctgcctcgtatctgcagaagatcgtgaccaggcccaacacagcggagctgatgactatagggcaaggagacggcgagattctcgatatgaccataaccaataacaaaattgttggtaagaaatttaaggacgtgagcccaacaaaggactttatgattatcgctacgtaccagaatggcaccctaatcatcccccagcctgacaacatcataagccgcggcgagaaggtgtctgtgctggtcaagcgggggtccttcagcaaggtctccaaaaaactcgagaacaagtcctga

SEQ ID NO: 9777 - DNA, 612 bp, synthetic construct
  source 1..612: mol_type = other DNA
atgtccaagatcgtgttcattttgggctacaattacgattcaaattgctatctgatcgatgataaaatcctggtggacaccggcgcgggggaaaacagggactacctcttcagcaagctgcgagaaaacggcgtggaaccggacgacatcgagctagtcgtgaacacccactgtcatttcgaccacattggagggaactacctgtttcccaatgccaagattgccgttcacaaattggatgcaacccccatcagaaatgaggacacattaggcacggccggcactgcttttggttttgacaacataaacaattcccgggttgatatcgagctggaagagggggataaaatagcagacttcgaggtaattcatactcctggccacacaagcgggggaatatctctgtgggacggggagaacctcatttgcggagataccatctttgctgggggaggtgtgggacggatggatatcggcggaaactatgacgacatgaagaatagtgtggaaaagcttatggccctgaacgtcaagcgcatcttcccaggtcatggcccaatcgtcgagaacaatggcaaggagcacattaaactctcgtatagctacctttga

SEQ ID NO: 9778 - DNA, 411 bp, synthetic construct
  source 1..411: mol_type = other DNA
atggcgaaaaagggaagtgccgaggagcgagagctggtacacaagctctgggaacgcaatttcgcagccatgagggctccagcctcaggcggggcgaccaaaaagtcccttcctgatgtggtggccggcaatggcaaactgtacctcgctatcgaggtcaaaacaactacaaaagacaagatatacattgacagcatccagatcgaggagctgtgcgaatttagcaacatttttggagccaagccctatatcggggtccggttcaaatacactaagtggctgttcctggagccggacaacacgccccggaccaagaaaggcaactatcgcgtggaaaaggactacgcactagagaaggggttggagatagatgaaatcaccggtattgatagacagatgaagttcgaatga

SEQ ID NO: 9779 - DNA, 981 bp, synthetic construct
  source 1..981: mol_type = other DNA
atggatagcaacatctttgatttaataaagaaagccaatgaagtcacgctgaacaagcacggcgatctcattaccctggagcgagctgtcttcctgtcctggtggtgcgataagggcgactgtgccttttgctacatgtccacacagaaggacaagattagagatccgaccaaggcgaggcgcaacattaataacatctatgctgaagccgagatgtgtaagcggctggactggaacattgaatttctctctggtggctacgagagttacaccacccaggagataaaagagatcgccactacaatcaaggatatcactggcgatggggtgtggcttaacactggcatcacggacgaactagaagagtacggttctgaaataaaaggaatcaccggcgccgtggaggtggccaatcccaagatccatgaaaaggtttgccctagcaagaagctgagcgacatcagtaacatgctcgataccgcaaacgacctgggattcaagaaggccatcacgattatcttggggcttggggaaaccctaagcgacgtggactacatcataaattatattcaagcccacaagatcgacagagtcatcttctattcactgaatccccacaaggagacaatctatgcaaacagctcacagcccgcttccctctactacgcgcaaatcgtggctcaggttcgcctggcgttcccagacattgagatcatctgcggcacttggattgataatcttgcaaacatcggcatattgatactgagtggtgcaaacgggattaccaaattcccactcttcaaaatgttcggaacaaagtacggaaaaagggtggaggaggaagtaaagtggaccgggcggaaactcaagggaacatttacagacaaaaatcagctggggcctaaaaagagcgagatttccccagagttggacaaatttattaagcgttacgtgaaagagtcgctgaaaaataaatattga

SEQ ID NO: 9780 - DNA, 1353 bp, synthetic construct
  source 1..1353: mol_type = other DNA
atgatgtgtggactcgagatccacgtccagctagaaaccgagtcaaagctgttctgcgactgtcctacaaactatcaggacgcgccagccaataccaatatctgccccgtgtgccttaaccagcccggagccaagccccatcccaccaataagaaggctttagagaacgccctgatgattgctttgatgctcaactgcgaaatcgaccaagacgtcatctacttcatgcgcaaacattacgactacccagatctaagcagtggctatcagcgaacttcggtcccgatcgggatcaagggggagctgaacggaatcagaattagggagattcacgcagaggaggacccggggcagtacaagcccgaccgcgggatcgtgaacttcaaccggagtggcatccccctggttgagattgtgaccgagccggatataaaatctcctgaggaagccagaaacttcctgaaagaactgattcgtgtgctccagtacagtggcggggctcgcggcgagggcaccatgcgggcagacgtcaacatttccatcaatggtggcaacagagtcgagatgaaaaacgtgaactccatcaagggcgcctacaaagccttgaagttcgagctcgtacggcagaagaacctgatgaagagaggtgtggaagttaagcaggaaacgcgggcctatctggagtcccaaatgatcacggtggggatgaggatgaaagaggatgccgatgactaccgcttcatcacggaccctgatctgccaccaatgcagatcagcgatgagacaattcaaaggatactggacaccatgcctgaagccccccacaacaaggtaaagcgatttgtggaagattatgggatcgatgcggagtctgcgaaggtgctgactagcgagctcgacttggcgattgcctacgaagaagtggtaaaagagatcgagcccatatttgcatccaagtggatgagggacgagcttaaacgggtgctgtcttataacaaactcgattttgcagacagcggcataagcgttgccaatctcattgaatttctgaatatgattcagacaaaggagattacccagaaggccgctaaaaaaatcattgaacagatgccaaataacgagaagacacctaaggcaatcgctgaagaactgggcctcctaggtgtggtcaaagatgacgaggtgcttgcagccgtcaagcaggcaatcgaggaaaatccaaaggctgtggaggattacctggccggtcaaaaagcttcaataaatttcctgatgggacaggtcatgaagcttacacgaggaaaagctgaccctggagaaactgttaagttgttacgcgagaatatagaatga

SEQ ID NO: 9781 - DNA, 807 bp, synthetic construct
  source 1..807: mol_type = other DNA
atggtggagaagaaatctttcgtcaaagactacatgaccaaaaatgtgatctgcgtgtccccaaacacccctactgaagagatcatcgaactgatgaggacaagccggcacaacagttaccccgtggtggtcaatgaccggcttgttggaatggtaaccgcgttcgatgtggtatctaagaagtggtcggacacggtagaagggttgatgagcaccaagctcgtggtggctaacccggagttgtccataaatgatgcctctcgcgtcatgtttaggcggggcatctcccgaatgcctgtcgttgacgagaacaggaaaattgttggaatcataacaaacacggacatggttcggagtcatatcgaaaggagtacccccaataaggtggagtacttcaagaaaactctagagcagctctacgatatcaaggccacactgagacacatgcccgtggagaccaacaagctccgcccaacccaagatcgcgtctatgcggatgagctggagggcagaacttacgaactgaagagaggcttagcagaaccagcaattgtggtcaaaacgggtaaccgatggattctggtggacgggcaccaccgcgctgtcgcttcatcccagcagggttatgaaaccgtggatagctatgtgattgacctgggacaggacatcaaactggggatggagaagactgccgataaagccggcatcaagacattttcagacatcgagattattgacgatgacaagcatcccctgatagccctcacagaaagccttcaggatcaagagcgtaagagcgacgactga

SEQ ID NO: 9782 - DNA, 288 bp, synthetic construct
  source 1..288: mol_type = other DNA
atgaatgacaagattatacgagaggtatacgaagtgctggaatcacgccgggacaaccccattgacagttacaccagcaagatcatgcagaatagcgacaaaaaggccgaggacaaaatcttggaaaaaatcgccgaggaggcgggggaagtcctgattgcttctaagaacgatgagaacctagtgtatgagtccgtcgacctcatcttccacacactcctgctgcttgcatacaaaggcatcgacctggatgatgtgtttgatgagttcgccagaaggcggaagtga

SEQ ID NO: 9783 - DNA, 768 bp, synthetic construct
  source 1..768: mol_type = other DNA
atgttcgacaccttcactgaaaagaaatttctcctgaaggagttggtcaaaaaagatttgacgagcaagtataaagactctgtcctaggcatactttggagtttcttcaacccccttctgataatgttagtgtttacagcaatcttttcaatgctcttcggacggcagattgagaattatcccgtttatttcctgtccggcaggatcatttttgacttctacaacagtgggacaaagggtgctatgaagagcattaagcgaaatgccaacctgttaaaaaagatttacgttcccaagtacatgtttagcgtaagtaccatctgctatgaatttgtgaactttctgatctcctttgtgatactattcatcgtcatgatccttacaggcgctaccttccattggactatagtgctctccatcatccctatgttcttcctggtgtgcctgatcttcggggttgggttgattctggcggtctgcaacacttacttctcggatatcggtcacctttacaacgtcttcaccctcgtactgatgtacgcctccgccttgttctaccctatggagatcgtgccagcaatagtgcagagaatctttaccctgaatccagtgtacagcgcgatttcttgtttccgcgagtgtatcagctatggcatttttccgaatacgtctaccctggcctacctcgccattttttcatttacaaccctgggaatcggactgtatctcttcaaaatttacgagaagaagctcgtgctggaaatctga

SEQ ID NO: 9784 - DNA, 1425 bp, synthetic construct
  source 1..1425: mol_type = other DNA
atgaacttgatcaacaagatcaggaacctgtttaacgataacactaagcaggaaaagaacaagcacattcctcttgacgctaaatttcagagcagtcgtttcaagaatatcaagatccacgcaccggactacgtcatgtccaccgaaaacagataccatatgcagatactcgataattctaacaaccctatcaaaaacgaagccataacactggtgattaatggaaagtgttacgagaagataaccaataaggacggctatgcatccgccaaaatctcccccaacaagaagaagaaggagatgaaaatatattatctctcaaatgaggagtactgcccctgcataattgccaaactcattcaccctgataacattaatcccgaggaaaataatgaaaaccccaaactgtacgccccagatatgagcatctattcgaaggacgagccagaatacaatgctcgcctgctggatagtgaggacaacccaatgatcggggaaacactaatattcaactttaataaccagacctatgagaaaatcaccgacgaagaaggcttcgccagcatcgatctgaagttggatgaggggacatattccattgaaacaatcttcaaaggcgagaaggacagcaatcccattaccaagacgtcaacaattaatgtgaaaaccagaaatatcgatcggaagatcatgatcgaagtcaaacaccttgcaatggagttcaaaattagcaaagacaagatagacacactgaaagagtacgtgattcgaacgatcaaaagaaccaaaaaggagcacgagaaaattcggatcttggacgacatttccttcaacatttaccagggagagagggtgggcatcttaggcttcaatggtgctggcaaatccactctactccgaattatagcgggaatctatgagcctactgaaggcgaagtcataatcaatgggcggatcgcaccactgcttgagttaagtgccgggtttgataagaactacactggaaagaacaacatctttctgaacggagctctgcttagcatggaagaagacttcatcaaggagaaatacgacgagatcgtcgaattttctgagctcggcgagcacatcaactaccccgttaagaactactcaaaggggatgagggcgaaactgggtttctcaatcgccacgctcgtaaatccggagattctcatcattgacgagattctggcggttggagacattaaattccgcaagaaaagctctgagaagatcaagtcgatgatgaaggagggtgtgaccgtactgctggtgtcccattctattagccaaatccgcaacatctgcgatcggtgcatctggatcgaaaatggccatgtgtacatggaggggccagccaaaaaggtgtgtgatgcctatgtgaagagtgctaagaagaagtga

SEQ ID NO: 9785 - DNA, 501 bp, synthetic construct
  source 1..501: mol_type = other DNA
atgatactgatcttcctgattatagggtgctgttgcctattctacgttgtggaaacatcaaccacggtggggaatgctattactgtcgtgaacaaaacggtggtcacactgccaaacgaatttagcattgagtcgcgggagactggctacggcaccttaattaacaagaacacaaaggaaaaaatcaccatcaaagatctgggtaagggaaacctcgccctgactaagtttaagaacgcacttaccgacctgactaaaaatcccgacatcgaccatgtgaaaaattccacaagcaacattaacaacatcaccgcctataagatcgattatcaggacataacaaaagagaataactccgatctcagtaatgtttatgtctttacgtgcaatcacaccttcctcatcaagcttgagaattacaacaataacgtgaagagcgacaacgacttggattacgtaatcacccacatgaccccggacttcaagcagtctcaagattga

SEQ ID NO: 9786 - DNA, 2544 bp, synthetic construct
  source 1..2544: mol_type = other DNA
gtgatcaaattggacgaaatcgagtttagcgtgatcatacccacgcacaattcagagctcggcatcaaaaaaagcatcaagtccatcctgaatcaaaccctaaactttgagaacaacattgaaatcattattgtggacaacaatagtgaggataaaactcaggacatttgctacgactacatttccaagtacccgaagaacataagctatatccagctggacaccgtgaatctgcacaaaagcaaaaataccgcaatgaagcacgcttatgggaaattcatcacatttctcaaacctcatgactacttgtcaaaggattcactttcacatctgcttaagttcatcaacacccacgagaacatcgacctggcaatcctgccgatcttctattataaaaacaaccgcaaggagcgttacataaattataagattaagaacaacaaaaagatcaacctgatagagcaaccacaatattcccagctgattggtctgtccaccttcttcaagaaagagagcattaagaacattgagtttctggatactactaacgaaaacattactttcttcagcgaaatgctgataaacaatccttatctcgggatttgcagcaaaggcgcctacttcgccaagaacattgaagaacggatttatccttccgacactaccatttatagcaccaaggagtacgaaaagtttatcaaatacaattttaacaatctgaagaataagtgtttcaacaagttttccaaaatacccgagtttatccagtttagctttatcaatcatttacgatggctgctgtctatcaagaagacagaagagaagattgatttgaaaagtctgatcgacaccatctcatatatcaacaatgatatcctcctcgagaaccgccttctcaaacaggaactaacgattaccacgtttctgctcaagtacaacaacgacctgagcaacgaccttatggaaaagctggacctgaataccctgttcatcgacatatacgatatcatcgacaacaagatccacattctagcgaacatcaaaaacatcacaaccggagatatcaacatattagtcaataacaaaaagatcaagttcaaaaaactcaccttcccgcacaagtatgctcctagtctcgggtataacctactccaggattactccatcgagtgtatcattccaattaaaacaaatgaaaagttcaagcttgaatttaaacagaaagacaaactgctgcacatcgacttcagccggccttgcaatttctccaaaagtgtcggttacgccaagactaaacactacttgagtatcctgaaggacgaccacatctcgattgagaaaaaaacaacattaaagtggataaagcaggaactcaagagtcttaagacgatgttcaagaaccacgagactggcttcataaaagcagtgccctttagggtagcttatatgataagttaccccttcctgcggaataagaaaatctggtttttcatggaccgccccgatgaagcagatgacaatggactggccctcttcaagtacgctgtcaaacaggaggatgacatctctaagtactttattcttagctcaaagaataacgatttcaataatataaagaagatcgggaaggttattaactacaaatccctcaagcacagatttttaggcatgttcgtggagaatattatcacaagccatccagacaacggcatcatttacccattctggggaggttacccattcttcgccggccttctcagatcaagcacgatgtttttgcagcatggcgtggccaaggacgacatttcctattgggcgaacaaggctaacatgaacttatctctgtttctgacatcgactattcaggagtacgagtccatcctggagaaccactataactacgatgactacgtggtgcaactcctggggttgcccagatttgataaccttaagaatcaggaagaaaagaggcagatcctgattatgccttcgtggcgccgggacttgaattataaaagcaaggagtacatcaagaagaacggctttttcaaaaagttcaacagccttataaacaataagcgactgatagagacggcccgggagaacaactacgagatcatctttaaaccacatcccaacgtttacaagttcattgacctgttcgataagaacaattatattgagatcgactatgggaaaaccaagtatcaggaactcttcaacagcggaagtctggtgatcacagattactcgtctgtagcctttgactttgcctacctctacaagcccgtcctatactaccactacgataatgactaccatttcaatctggaagagggatacttcaattatgagaccatgggatttggcgaggttgtgaagaaagaggatgagttggtcgacttggtcatcgaatacattaagaacgattgtaagatcaaggaaaaatattccaataggatcaaaaataccttcaaattcaatgataaaaagaattgcaagagaacctatgataggataaaggagattacactgaaggattga

SEQ ID NO: 9787 - DNA, 570 bp, synthetic construct
  source 1..570: mol_type = other DNA
gtgattaacttgaggtacgtgaacttcaatccacacattcacgatacgtataaggtcgccgagctagtatacgacgtggatttccgcacatttgacttgctgtttaaaacccccaaggaagctatcagtacaatcgagaacgacctcaggaagcatggaccggaaaacactttcaaagtaattttaaatgatgaaatgcagataattggggttcttataatgtacatttctgagaagtcatttgaccttaggctcaagagcttgcggcttatcctcgtggacatactcgactatttcgtcctgtgcgacgtgaagaaagatgatctgtacctggcagagctggccatcgacgagagcctgagaggccaggggctgggccggaaagtggtcctggacgttatcgattatgcccgctccaagaacctgaatcgagtcattatcgacgcagattttagaaatgtgggcgcgcgaaagctgtacgaaagaatcggtttcaccatcttcaacaaaaagcgggtgaaaatcgggaatttcgagcgcggaatgtacaacatggagctaatcctctga

SEQ ID NO: 9788 - DNA, 762 bp, synthetic construct
  source 1..762: mol_type = other DNA
atgaaggacatcctggagagattggtggacggcgagatcaacattgatgaggctgaacgcctgatcaacgcggacaacatccttgagtttaatgaagtggccaaattcgactccaagcgcaagaatagggccggcttcccagaggcggtcttcgcacagtccaaagaatacgaggatttactgctcataataaaaaagtacatgcagagcaataacgataatctcatcgttacacgcctttctaaggagcgatatgaaaatattctaaacgacctcggtgagaacagctttgtgttcgaatacaacaggcgagcccaaattctgatcataagaaaagagattgtcgaaaagcccgccatcgcaaaggtgggcatcatgaccgccggaactagcgatgtcaacattgctgaggaggcccgggtgatcgtcgaggaaggcggttgtgaggcgatcacatcgtatgacgtcggggtggccggcatccacaggctctttccccagatagctcggatggtggaggagaacgttcgggccattattgtgtgcgccggaatggaaggaaccctgcctagtgtggtggcagggttggtggacgttccggtcatcgctgttccaacgtccgtaggctacggggtaggggaagggggaagagtggctctggacgccatgctgcagtcatgcgctcccggaatcgcagtggtgaatattgataatggttttggcgccggcgtcttcgcactgaccatcgtaaacagtgattga

SEQ ID NO: 9789 - DNA, 2241 bp, synthetic construct
  source 1..2241: mol_type = other DNA
atgaaagctctaaagattctgacacagggcatagtgcagggcgtcggattcaggccctacgtgtatagactcgcagtagacctgaatctcaaaggatacgtgagaaacctgggcaatgtagtggagatcatcattgaggggcagaatacggagctgtttgttgacagactccccaaggagctgccgcctattgccaaaatcaactcaatgaacgtcgaggaaatcgagaagactaactatacggattttaagataatcgaaagtggcaactcctattctggcattagcgtcgttccacccgacatcgcaatatgcgataaatgcttggaggaaattcgcaatcctactgataggcggtacaagtacgcattcaatgcctgtactgattgtggtcccaggtttaccgtgatcgaaagtgtgccctatgacaggatcaggacgagcatggacgagttcccactctgcgacgattgttccgtcgagtacgaagaaccactgaaccggcgttaccacggggaggccatatgctgcagtgagtgtggcccccagatggagatttacgaagggaaacacaaaatcaacacagacaacccaatcaaggtcggtgccaacaagctgaaagatgggaagatcctggccattaaaggcatcgggggcacccacctggttgtcgatgcctataataacaaggccatcaaggagctgaggaaacggctcaaccggccaaaccaagctttcgcagtcatgtgtaaggatctggaaagccttcagaattatgcagaacttagcaagaaggagattgacacaatctccagcaataaaagacccattgttatcttaaagaaaaaaaacaactatcccttccctgagagcctgtccccgagactccacaatatcggggtgatgctgccttactctcccatgcattacctcctatttgacgagggggacattgacacctacgtgatgacttctgccaacattcctggagagcctatgatgatcgagaatgaggacatcatcaacggaatcaatgattactcattgatccacaatcgccgaatactaaaccgatgcgatgactcggtgatccgatttcggaacaatgagttgagctttattcgacggagccgcggctacacaccagagccctacaccataaattacgaggtgaacgacttgaatatactggccctgggtcctgagctcgatgtgacattctcaatcgccaaagacaatatcgcatatccctcccagcacatcggcaatactaacaaaccaaagactttagcattcctgcgcgaggctattgaaaatatgcagcgcattaccaagatcaacgagtatgacatcatcgcttgcgacatgcatccgcattttttcacaacaaagctggcttatgagcttgctgaaaaatatgacgcggaggtgcagccaatccaacaccaccatgcgcactctgtcgctctgtccaacgacaacgcaattgacgaaatgattgtgatcgccgctgacggagtgggttatggctcggacggaactagctgggggggggaaattctctacaccgacataaagaacttcgagaggctcggccacctccaaacccagctaatgccggggggtgacatcgctaccaaataccctgccagaatgctggcaagtatcttgaacgatgaaaatctcatcaagaattacagcgactacttcaagtatggcgaaattgagatcaagaacattttcaagcagatggatgcgggcatcaacgtgggtaaaacaaccagtaccggccgggtgcttgattcaatggccgtggctcttgaaatctgtaacgaacgcacctacgagggagagtgctcgatgaagctggagagcgccgcctactattccaacaagaacatagaaatccccttgaacattgagaacaatattcttaatacctccgaaatattaaaggaagttgtaaagctgtatcaggatggtgaaaagaaggccgatgtggctgctgccggacaaaacgccatcgcacgtgggctgagccagctggccataaacgctgcctccaaaaagagtattcaggagattggggccacgggaggagtcttttacaatgaggcgattaccaacacagttaagaattacgtagaaaacaatggcttcaactttattcagcataaaaatacgtgcgcgggagatggatctgtgtcactgggccaggccatcatcgcgaaaaaggtctga

SEQ ID NO: 9790 - DNA, 576 bp, synthetic construct
  source 1..576: mol_type = other DNA
atgatcagaaacgacgacatcgacaacattaaaaagaaccggaagaacgtcaactcgtctaacggccacatagagatcagggggaactacaatgaccagctgggagggatcgacaaagaggacatccttgatgtgatgggttgcaagaccaggcgagacatcatcaacctcctgagggaggagccgatgtttgtaagtgaaatctcaaatgaactggatatcggccagaaagcaattatagctcatctgcgggcgatggaggacatcgggatactaaatagcagctacaagaagattctccgaggacgcccacgtaagtactacgatctccagaatgaagtgaatattcacattaccataaataggaacactttcgatgtgaacttgagcgaggatatgctcaacacactacaactgccctccggcgacgaatggtcccgcctgctggatattgagaagagaatcgacgatggacagctggaggccatcgacgagttgaagaatcagatccggctctatggcaatcttaaagaacgcgccgagtatattctggaaagaacgttaaaaaaccggtga

SEQ ID NO: 9791 - DNA, 552 bp, synthetic construct
  source 1..552: mol_type = other DNA
atgacagacgagaataaaagcgaaaccgaggcggagactcaggactttcaggaaaagtatgatgagctgcttgagaagctggctcttaaggaagaagagctgaaagaagtgaaggagaacctggagaagcaggaagccgagacgcaagagtacatttccctcagtcagcgcctgcaggcagatttcgagaacttcaagaaaatcaccgacaaacggaacaaggagtttatcaaattcgcaaatgaggacataatcaaggactttctggactgctacgaagatttcggtagggccctagagatcaagaataatgatgacctgaaggaaggggtcgagctcatatataacaagttcaaggacattttgacaaaagaaggcatcaaggagatccccaccaagggagagaagtttgacttgaacaagcacgaagccatgatggtgcaagaatcagaggatgtggagaacgattatattatcgaagagttaatgaaaggctacatgtacaaagacaaagtcctcaaatacagcaaggttattgtatgtaaaaagtga

SEQ ID NO: 9792 - DNA, 1872 bp, synthetic construct
  source 1..1872: mol_type = other DNA
atgagcgatacgaagaaagagaagattatcggcatcgatctgggaacaagtaacagcgccgcctcggtgcttgtggggggcaagcctactacaatcccctcagccgaaggcgcaagtcagtatgggaagagcttccctagctatgtggcctttacccctgagggtcagatgctggtaggggaaccggccagaagacaggcggtgaccaacccagaaaatactatttccgccattaagcgcagtatggggacggaccacaaggtgacagtcaacggaaagcagtactccccccaggaaatctcggccttcatcctgcagaaaatcaagaaagatgccgagaccttcctaggagaacccatcgagaaggcggttattacggtccccgcgtactttgatgacaaccaaaggaccgctaccaaggacgctggcacaattgcaggacttgacgtggttcgcctcgtgaacgagccaacagctgcatccctcgcctatggccttgacaaatcagaggatgatgacatgaacattatggtgtacgatctggggggcgggaccctggacgtcaccattatggagtttgggggaggagtgtttgaagtaaaaagcaccagcggggatacccaactgggcggcactgacatggataatgttctgatcaagtacctggccagtgagtttaagacccaggagggtattgatctaatggacaacgatcaggccgtgcagcgactcagggaagcggctgagaaggcaaaaatagaactgtccaccactacaaccacccaggtcaatttgccattcatagctatggggagcgacggaacacccaaaaacttaattatcgatctgacaagagcaaagctcgaggaattggtcgacagcattgtggagaagtcggggaaacctatgcagcaggccctcgacgatgctaaaatgaataagtctgagatcgataagatcattctggtgggtggccctacccggatgccaattgtccagaagttcgtggaaaagttcatagggaagccagtggagcgtggaatcgacccgatggaatgcgtttccatgggcgctgccatccaaggaggagtgttggctggtgaaatcaaagacatcgttctgctcgacgttacccctctgagcctcggcatcgaaaccttgggtggcgtgtcaactacgttaatagagcggaacacaactatccccaccaaaaaaagtcaggtcttctccacagctgccgataaccagccaagtgtagacattaatgtcttgcagggcgagaggaagatggcggcggacaacacgagcctgggacggttccaactggtgggcattcctcccgcccccaggggcgtgccgcagatcgaggtgacttttgatattgatgctaacggtatcatcaatgtgacggccaaggacaaaggaactggcaaagaacaggccatcactataacctcctcaaccaagctttccgacgaagaaatcgaacaaaagatcaaggaggcagaaatgaatgctgaggcggatgccaagcggcaagaggagatcgagatccgcaacaatgccgactcactgatctacactagcgagaagacgcttgatgacctcaaagaccaggtctctgaggacgagaaaacaaaagtcgaagacctcgtgaaggagctgcgagagctgatagccggcgatgacgttgacgccataaaagcaaaaagcgatgagctatccaacgtcgtgcaggagataggggcaaagatctaccagcaagcccaggctgaagcacaagcacagcagcaggcaggtgctgaccccaatgccggcgctcaggacaaggatgacgacacaattgatgccgactatgaggtaaaagactga

SEQ ID NO: 9793 - DNA, 1146 bp, synthetic construct
  source 1..1146: mol_type = other DNA
atggcagacaagcgggactattatgaagtccttggagtcgataagtcggctgacgagaagacaatcaagaaggcttatcggaaactggctaggaagtaccacccggacgtatgtgacgagccggatgcggaagataagttcaaagaggtatccgaggcctacgcggtcctgtccgatgatgacaaacgccaacggtacgatcagtttgggcatgcaggcatggacggcttctccgccgaagacttctatcaaaatgtgaacttcgaagatatattccagggctttgatatcggcaacatctttgatatgttcggatttggtggcggggcccggtccagggggggacgaactggcccccagagagggtcagatatctacaccgagataccaattaccctggaggaggccttcaacggctgcgagaaggagataaaaattaccagaagtgagctgtgtcctacctgcaagggaagcaaatcaaaacccggttctaatccagagacctgtaagacttgtggcggaacaggacagatcaaggaagtcagtaacacgttcctgggccagatggttaatgtaaggccctgccgggagtgcggcggtacggggaagattattacagacccctgcgacgaatgccacggccgcggtagcgtgagaaaaactaaaacaatcaagatcgagattccagagggggtggacgaaggaaaccacttgcgagtgagccgcgagggaaactgcggggataaggaaggtttggaaggcgacttaattgtgactgtccatgtgaagaagcacaagaaattcaaacgtgagggcgaccacctctacctggagcagcagatcagcttcccccaggcagcccttggggatgtgctcagcatccctaccatcgaagggaaggagattgaatttaaggtcaccccagggacccagagcgagacggtgtacaagctacgcggccagggtatgaactccgtgcgacataacagcaggggcaatctctacgtgaatgttacagttgtggttcctaagaaactgagttcaaaacaaaaggaactgctgaaagagtttgccgaggtcagcggagacgaaatcaagcacgtggaaaaaggactctttgacagagtgaaagacgccatgaagtga

SEQ ID NO: 9794 - DNA, 3489 bp, synthetic construct
  source 1..3489: mol_type = other DNA
gtggtgttactttcgacgggcgtggcgtttgccattagtgaaaacgatgtggctgtctccaacgacgtggggatcgtgaacgagacggttctagaggtaagctccgacgattcggatctcagcgaagcggacgtgttagagacacaaaccaacgtggtgaccaaagatacgttccacaattacttcggaaatgacggtacacttctggacaacgtgtctagtgacgagctgatattcaaaggagatttcaccggaatcgacgtcagttacatgacaattggcaagtctgttaagttgtctggcggtaataccaccctgaacaacgtgactttcatcatcggggccgacaatgtggtgattgatgggttcgttctcgatcattccgatgtgtatctgtttgatatagaaaacgtcaacggcgtgactctgtcgaacaatataatcaatttcaaaacactcgaagggacagagggatacgctatctttgccaacactgtcaacgattttaagatcatcaacaatacgatcaattacgtgggcaacaccaaagggacgatggttaataatgcgatccgggtgaccggtgacgaggatagcgccatcgcctcaaaaaagatcatcgtggaagggaacgtcattaacataaagatcccatctgtggacgtgggttacgaccccgtgacctgggaatcaaaggtgttttctgagggcattgtcttctattattgtgaggatgtgaagtttatagataaccgggtggacctgaagtataacaatttcagtggtggcttcgatacgatttacgcactgagtgtacgcggaaacccttataacttcgagaacacaatcgtgagctctgacattgaaataattaacaatacaatcaatgctaatggacataattatatttacactatcttcctgtctgctaatgactttaaactcttcaataatgtaatcaactcaacagccgacttttattacgctaacggaatcaacattgatgggcccgcctccgaaggaattgtaagcaacaacttgatcagtgtggagtcaccatacgacgtgtatggcatctacagctaccagatgaacggccccattgagtatatctcctatgtcaacaatacaatcataggtaaatcctatgtcggctgcggaatggaaatcgttgaatgcaatccctacatcgcagacaacctcataatcatgaatggtaactatacctttggcgtggtcgcaagtattagggataatgggaccatctcaaacaacagcatcagcagcctgggaaataacaatggcaccgatggaaccggcgatccgctgttgcctttaaatagcctcggcatcagtgtaaaggggagtgtactgattgaaaagaacaaaatcaactccgggggcatcgggctgaaccttgtcgaaaaaggcaacattaccattaacgataacaacattaatgtgaacacgactggcggcgttgagagttatgccatctactccgacaagcttagtaacctagttattagcaataataacatcctctttaccggaaacaccaatggaaccatggttaataacgccattcgggtcaacggtgatgaaaataagaagataattgccaagaacattatcgtcgacaataacaatatcaacatcaacattccctccatcgatgtgagttacaaccccgtcacctacgaggcaaccgtctactcggaagggattgtgttctattactgcgaggatgtcaaattcatagataaccgtgtcgacctcaagtataacaattttagtggcagcttcgacactatctatgtggtgagcgtaagaagtaacccgtataactatgtgttcgacgaggaggacaatatcatctacagcatcgtcagctcggatatcctgatctctaacaacacggtcaacgctctggggaataactacacctacgggatctacatcagcgcggagaacttcactgtgggtgacaactttgtcaacatcagctccgatggcaagtacgccaacggagtgaacgttgacgcattgtccagcaacggggttataaaaaataacaatgttatcgtgaacgctgacatcatcgtatacggcgtgtactctgccaatttcatgggccctattgagaacatcacttacgacaacaacacaattcgcgtaaatgcctatgcggcttgtgcgatggaactcatggagccaaatccgtacgttttcgacaacacaataattgctgctgggaactataccttcggcgtggtcgccagcatcagggacaacggaacaatttccaacaattcaataagctccctgggaaataataatggcacgaatgggactggagactccattctccccctcaattccctggccatcagcacgaaaggcgatgtgataatcaaggataatgagattgtgacaagcgggattggggtgaagacactgaaaggaaacgtggacattctaggcaacgacattagaactaccggaaaccacaccatcgaggccataaattccaatctgacagtgaagaataactacttggtaagcaaaaaagccgtcggcacagactccatcgtgtcagacaaggaggttatatcggctaataatacccccgccttgaagaccatcatatcggcaccaaatatatttactgaatatattaagggcgcggtcttcccagtcgcagcactggacgagaacggagatccaatcagcgacatcgttctctttctaacaatggacggcatcgtgtacaatgtgaccaccgatgcaaacggctacgccgccttcctgcttaaccctgattccggtattcacaatgtcgtggtctcctttaatggtaacgaggtctacggccctaaatcagtaaatagtattatttctgtggacgcctccgccagcaagatcgttgccaaaacatctacaaccgtgtaccttacgtcagtgaagtctggctcatactttaacatcgctgtaaaggacgtgaacggcaagggtctggcaaacaagaaggtgagcatttacttcaacggtaagactaagagctacacaacaaattcactgggagtcatcaagttcaagctgtccgccaataagatagggaattaccagttgaagatgaaatttgctggggacaagaactataccgcatccactgccatcgccaaaatcaaagtcattaagcaggcaactaagctgaccgtggctaaaaagactttcaaagcgaagactaaggtcaagaagtacaccatcactcttaaagacaacaaaggaaaggcaattaaaaaagccaaagtcaccattaaggttaaagggaaagtgtacaaggccgtgaccaacagcaagggcaaggccacttttaaaattaccaagctggctaagaagggtacgtacaaagcttatgtgaaatttgcagggaataagtattataaggtgtcctcaaaatctgttaaaatctcagttaagcgatga

SEQ ID NO: 9795 - DNA, 4065 bp, synthetic construct
  source 1..4065: mol_type = other DNA
atggtgaagaaatttaacatctccttgctcctgttcctcatctttataagcatggctactgtgtgcgctagtgacaacatggaggacacgctgaacaacaatggttctatcctgagtaatccctcggacgagagcatcttgctttccaacgacgatgtcctagctgagtttacaacacacgagataaatgtagaaaagtacagcatttactttaacaataacggcgacctaatctctagcaaggttaaatccggggacacacttaattttactggagattggaatgaggtgagttctaaaacctttaatttcaataagaccctgaacatcgtgtactctggatcaaaaccaatgaagaacggcgtcttcacattctacaacggtgcaaccggcagttccatcatcggcctgaatatcgctaataccgaggactacaactacggaatcttcctgaatggcgcaagtaactgcattgtcaaggattgctttatcaacaacacaggaatgtcctcctacgcaatttgcatcgccaataacgccaattacaacaacgtctcaaataactttttctgcgactacgggatgaattacgggggtcagggaacccggagcaccccccctgtgctgctttcgggcgctcaccacaactatatcgctaacaatcatattgagtgtgacgatgccaacgggatctatctgtcttactatgacgggggccccctccatggcggggtgtctaattacaacttaatttacaacaacaccgtcaagtacaacgtgctcccaaccagctggggttatggcattcagataatggggggatacaacaagatctactccaacaggatcatcggtgccttcagaggcatcagcactagcaatggagcattcaatgagatcttcaacaatcgaatcatcaacatcacgggcgcggattttaaccatcctgttgtggaggtgggaggggagtacggaatcgttggctcagccaatgcgataataataaacaactctattgaaaacgcacgcatacttccagggagcggggcgatctatgctatcgacaacgccattattgaaaacaacaccatcgacgtggtgtcatccggatatgggattcaggccagtggaagtaatatttctatcaaaaacaattccatcattactgaatcgggcgcgggcgtcttctggaagggcgagtacttcgacctcgtggtagtgggtaataacatcacaagtggaaacggggtgggtgtgctggtgaaaaaagaaagtgtgaagaaaatgcccgggaatataacgattgtggacaactacatcagcacgggaaataagtatgccatcgatgccatcgaggtgaatgctgatactagttatgtgatcgaaaataacaccattcctaagggcaaggggatcgttgcaacgcctgaagggtcatatgacccaagcaagccacggtacatctttaagggaacaacctatagtatcactcccgagaactacgacgactatttcgatgtgggagggactctgaacagcgtggtgaaaaatggagacattttgtacttcgatggtaattttgagaacaagggcgtcatctacattaatagcgccgtcaaaattactggtaagaacccgaacttctataatgctaccttcaggataagcgagggcgtctggatcgaaaacctgacaatcaaaaataaggacagcgaacgcatcaacgcatggggaatcctcgtctataacaccggcggagcgataatctctaactgcaacattgaagtcacagaccccaacgcagcctacgccatctatgtggtcgaaagcagcgacattgatgtgttgaataataacctgacatcgaacgggaattatctgacctacacactcctcgctatatccgtctacgactgtaacttcatcaataacagcattcacaccattggaactgggatcgagcatgtattcgaaaatagccactgcgttgatggcaattccaattgtatcgatggctctacttgtgttggcggagacacggtttgtacaagcgggaacacgataactggaaaccacgtcctcaacgaggtttataggacctatggcattttgatggcctacagctcgggttgcaacatttctggaaataaagtaaatgccaccagcaagctgaataagacatccaacacatttaacagcagttggggaaataactaccataacaacatatccacaaactctatcgtaggtatcgacctgtactttaacagtcacaacaacaccttctcaaacaacaacatctacgtcaagtccaatgataactatatttacggtatgggcgtcctgggctccaatacggggcacgacgcgcccgagggaaaagacgcctctaacaatcaatttatcaacaataacattgtgttggaaggcgattactttgttcagggtctagtgatcggccacgagtcaaaaaacaccacactcatttcaaacaccgtgaacgccaagagcaataacttctcctacggaatcaatctggaagggtctcaaaaatccattattaaagataataatctaaagctgacctccgacattgtctacggacttgaggtgttccgctcgaatggcaactttattaaggggaacaacctagatatcaaggctaagcaggcctatgccatcgcactgtcaaacgctgagaataatattatcctgaataacattgtcatgaataacgttactggcgaggaaataacttacaacgtgtgtgattcactgggggtcggggtggctggaatctgcctcaagtttaatagcagctccaacaatatatctggcaacaatataacctctaaaaagggctacgcaatcgtgattgacaagctggccattaaaaacaatctgttttacaattatctcaattccgagatgggcatcggcgacaaggcgatcaataacacaaacaataatttcgttaaggggaactacatctatattttaaatggactcatcccggaggtcacgattaactacctgggtaccgcagatattgtgctcaacgttggcgtggatggggtattggtgaagttctatatttgtggggaagagatcggcaatgccacttcctcaaatggcgtcgccaagcttagatacaagtttgatgacagttatacgcccgcggggtactcgatcaaagccattgcatccaaaaaggattacttgaccaaagagttcatttcttacctgaccatcgaaaaaggcctgctgaatattaactataatgacgtcaccgccattccgacaagcaagggaaaatttgtcgtggttgtagaggatatcttcggcaattctgtatccggaatcactgtgaagttctatcgactgcagggaagggatgtgttcataggcaaggtcaaaaccgacaaaaacggtgtcgccacccttgtggccgaggtcccttcactgggtaactacaaactccgggcagatgtggtggaaaatgacaacttcaagagcaacagtgggaaagctaatctgatcgtggcctacaagccttcaatctatcagtataaaaccaaagccgtgtactacggtaatactataaagtacacggttcgggtgaagggcatcgacggtaaatatgttgctggggggaagatcgtaaccatcaaggtgaacggcaagacctaccgcgtgaagaccgataaatatggcaaggcctataagtccatcaagctgaaggcaggttcctacaaagtaactgcccagtatggggttacgaaggtgtcaagtaagatcaaattcaagccaattttaatcgctaaaaacattgtgaagaagaaaagcaagaaaattaagttctcggtgaagctcgtgaacaagcatggcaaaatacttaagtacaaaaaaattatttttaagatcaagaacaaaaagtatagtgccaaaacaaacagccacggcgtggctatattatccatcaagaacctgaagataggcaaaaacactattacaagcttctatggcggttgcacaatatcaaacacaatcaccattcgtagatga

SEQ ID NO: 9796 - DNA, 4815 bp, synthetic construct
  source 1..4815: mol_type = other DNA
atgtacattgacgtcaagggggtgaagataacgaaacgacttgataacaagctcctttttacactcttcgcagtcatgtttatactctttagtctcaactgcgtgttcgcacagaataacaccacagtaaccgacgtcctgtccacggtggaggacgacgttgggattcagcaaatacagagttttcaggtcgatgaaccgctactcgccgcgaccaacaacaacattcagattaatgtgaaacaccattataatgaaacggccaatacatgggacgaggacgggtacaatctggctaacgccacagtgaaactgtacggcgccaatgacaaactgatctccacccataagacagatagcaagggctcagtcctgatcaaaaacttaaaatccaccaagtactatgtggaggtgagttacgcagactacgaaccaaaaaagtctaaggtactggattttaccaagaagtccggaactttgaaaggatcatttgactttatccccgatattctattattcgtcgactataagtcccacaatgaaaagctgaatgtgttgatgaatatgtctaagagagtggctttcattagcacggggcaggactatgatgtgtctcgtgagtggctcgtggggtatgcacggttcatccacattgatatgttctccgagggagcatatgccatattcactgcggagaaactgaagaagctgctggccatcagcccagctaacgccaactataatgttgcctacacattcggcgtgtatagcaattccatcctgaacgccactggcctgcacatcgttggtgccaactcgaagaacaataccttcaacactatcgagaacacctatatcggctcttatttccaggccaaggacataaacctgtccgatgtgttgtaccataacatggaaaactatctgaaatacgtgtattatcttattaatccgtcaaagtacgagaatcccacacttaacgacagcaacgctccccagatgggtccagaatgcggattctaccatccagatctggggatcttcaccatctaccctgaaggcagcttgatcaataattggatcaaaacgaaccccggatacggggtggatggaatcggcagtctgaattggatgatacaggactacccaaagtggtttgtcgacctactggaccccacgaccttatttgagcagtttgaaaaccagttcatcgacagatttaaccctaacaagaagttcatcgctattgttagctactattgcggcggggaggtggttgattccttaattcggggttacgaagaaattggaaggcccgccttcaacgtgtttaagttctccacagaccccagcatgtcttccatactgaataagatcaataacgtctcaaaaataggaatcagctctatcacctcattatacagctggtctcttagttacgctaacggctcggccgagaaagacttatcggacatcgatgtggagatcctgaagggtgtcaacgaaatttcaaaatacagctacgaaagcgagctgggacctcaagtggagtggacgtactccgtgacctacccgagttttgagggggtgtttagtcccgttatcctgtcgtatctagacgaggacaaggtgcatgtaatccaaagcggcgtggacaagatggtccagctcagtagtcgctgggccgacctcaaagatcttaacaacagcgaaaaaacaatagctatcgtgctttataactaccctcctggaaaggccgagatcggcgcctcttacctggacgtcatgcagagtacctacgacctgcttattaagctctatgagaatgggtatgccattggggatattcgcaaaatgatgaatatcacagaatttaccaatctcctcatcgatagcggcaacaaaggatcatgggccggggggctccttaagaaatatgtggagaagaactgggatgaactggttaaacataaccaactgatctccatggatgagttcattgacctcacctccgaccttccagacgagctttacgaggaaatggtgacccaatggggtgccggtttggggaagagcatggtttacacagccagtgatggtaaacagtacctggtgatccctggcgtgtggttcggcaacatttttattacctaccagccaagccgggggtgggaggaagccgatattggcgaggttatccagaactaccatgacttgaagcttcctccccatcagcagtatgtggcattctacgagtggatggacaaggtaacaaaggctaacgccatcgttagtatgggaacccacggaacactggagtggctacctggcaaaaatatcggggtgggcagcggagactggtcctacgagctcaccagaatcccaacaatatacccatacattgtatcgaaccctggtgaggctatggtcgctagggaccgagggctggcaatgctcatcacccacatgactcccgcgatagtatcatctgagttgtacggcaattattcgatcctgaacaattacatcaatagctataacaatcagattaaactcaatgttactagcaatgctaatatatacaaagagaaaatcctgaagttggctcccaatctggggttccggaagatgagcaagggtgagtcttttaatcactggctggaggagttgcacctttatcttgaaagtatgggcgacgacctaatgacttacggactgcacaacttgggcaaagtgttgacagggaacgagctatctgaagaggtggtcacaatcgtaacctctcagacgaagatttacaaccaaataatggaatttctgtacccgaacctgaaaggcaaagacttttataaggatattcagggcgatgtcaaatacctcaacgagcggcacacgatccaggccttcttgcgaaactatgtggacggcctggtcaacggatcttccgttctggatctcgtgaacaagcttggtgtaaataaggatagctccttattctcatccatgaaatatgcgcaggatgtaatcatcaatatccagaataacaatgagtggaatgcaattctcactgcattaagcggcggatatgtgaaggccgggttgttcgcggaccctgcctacggtgacagcatccccacaggatatgacggatacgcatccgaccccactagaatgccctctgaggcagcatatgagtctgccgtcaacatcgtgaacctcctgctggcggattactatgaaaagcacgggaagtggccagaaatgactgctctcatcctgtggggcacagaaataagcagaactgaaggaattggcgttgccgaatttctctacttcttgggatgcaaaccgaagtgggcagagaatggtaaagtcattggcgtggagctactgcctctgaaggaccttaaggtgaagctgcacaacgggtcggtggtgaaccgtcccaggattgacgtctatgcaagcctggtcaccagtaacaaagattggattacttggatggtaaccgccactaggctggcggccaatgctggggaaagtgaaaatgacaactacgtcataaagcattataatgagtaccccactctggaccgcctctttggcctgccgggcaacattctggagggtactggcatgagcaccctcattccaaatactgccaactggaacatctccacagtgaatgtggagggcatgaacgtttacttggacacggtctcatttagctggaccattgatgagaagggcaatatcaacatcaccaaacagaaggatacctacaaatacctcctgacaaagacagagctgataacacagaacctagacagtacttggaggatcttagactcggatgattactatgactggttcgggggactgtacaacgctgcttcaatcctgaggcagaaagccggcctgagccgaccggacacctcattcgtggacatccgggacaagaacaagtatgttacgcggacctatgaggaagagatggagttcgaaatccgcaccactcttctgaacccaaagtatctgaagcctcttaagggaaccgccgccggcatgaactggatcgcttcaagaatgcagaacacattcggcatcctcaccattagtgggaacaagctgaataaggagctcggtaaccaaatgtccaacaccctgctggacctcgccagtggtgtgcgcgatgcaagcacctcttacggcattcagtccgctattgcgcacatgatctacctggcaacgcagggcacgtgggatgcagacagtgaaaccctgcagaaactcgctgacgagtatatgcgccaggtgctcaagtatggtgtggcctgttgtcaccacacctgtaagaacctggatttcaacaacaaggtcattcaagtctcctccctgacccccgctcaaaaggccgaatttgccaaaatactcgcacaagctactaacactgatcccctgtacgaggtggaaaaggattccgctaataatgataataatgcccagggaattgtcaatggcactaccaaagacaagcagtcagattcagagagcggggataaaacaagcttcggaggagattccagccaagcaggcgatgccaaaagcgcgtcccaatctcaggactctagtgatagctcaggggattcaggggctgacgcctacgagttgtcccagcagtccgcctcgaagtctacgagcggcgcggaatccagcatgccaatattcgttatcatcgcgatcattatcctgatcgtcattttcttggtgggatacgtgcgcaatcagaaagacgaagacttcgatgactactga

SEQ ID NO: 9797 - DNA, 843 bp, synthetic construct
  source 1..843: mol_type = other DNA
atgcacaagaatagcatcatcataattatcctgagcatcaccatcatcggaatgcttatcccagccggtttctccgcaaatgattaccaaatcgtgatcacatacggtgagactacaaagaacaatgctgaatacaagaacactgttgactccttctttgaaaaccaggcacacatggacttgaagggggtcaattccaaaataatcactgccaatgaagtgaacaaaatttcaagtacaatcactggaaagtcctataactcgaaccagatcttctcctcagcactagttgatctgggcgacaatgataacctgaaggttagcgtcgacaaaagcaaaattaccaccatcactggcgatatgtatctctccgcattaaagtcagccggcatcaccaatggccatgtgtatatcaccagtcctgtgacggcgactggggagtctgcccttgccggcatcatgaacagttatgaggtcgctacggacgtggagattcccgctccggtgaaggaggccgctaacaaagagatttatacacaggcggagattgtaaaagagagcaatgtgagcgccgacgacctgtcgaacttggtggatgacgtaaaggagaccgtgaaggaggaaaacattacagactaccagacaatagtcaatataatcaacaacacgaccattaattacaatatcaatctgacctacaacgatattgagaacctggccgaaagtattgaacagatacaaaatgtgcagggggacattaacagctaccagacagaagtcaacgatgtgctcaacacgaccgataccagcaacaccggatttctggacgggctcttcaactga

SEQ ID NO: 9798 - DNA, 324 bp, synthetic construct
  source 1..324: mol_type = other DNA
atggagcacattacctacgatgacgtggtggagtacaaccacctgttcaccctcgtgccatctttcgtcctggaaaaaatggccaagaagaacagcaacctggtagacaagtttgagagtgccatccagtcccatatcaatgatttaacggttgaacaacgcatcaaactgaacattatccttgacagcgacgtctcagaactgcaggatctcatgtacaacgcatatatgaggacaaacaaaaagcagtaccagatactggctaatcccaagtataagcagttcattgagctcaatctaggcgagttgcggaaaataatctga

SEQ ID NO: 9799 - DNA, 531 bp, synthetic construct
  source 1..531: mol_type = other DNA
atggacgctatagaagccgtggccatcctgatcctcgtggtggccatttttattctggtctactactatttgctaaattccccctcgagtatggataaactcaagaacattgtcccagaaagtgctgacgcgcacatggacgaagtgctcggcaaaaataatgtggattcaagttacgatctgtccaaggaggacgtcctgggtgacaaggaggaatccgaatcaatgggaaagcggatcaaggttaaactgagcgacatcgatggcagcacgattaacaccagcgcattctcccataaacttgatgcattcttagatcagaaaagcgaccagctgatcaaagactggtctctggccactacaaacgatttggacaaccttcaggccaaattcgatgagaccacaaacaatgtagatactctcgagaagaacttcaacgagtttaagcagagctctgaagagtttcaaaagatcaccggggagcgcctggacgacctggacaagaggatagagtctctcgagaataagtga

SEQ ID NO: 9800 - DNA, 411 bp, synthetic construct
  source 1..411: mol_type = other DNA
atggaagctatccccacaataccggatcagatcttttacttgatcatcctggtaatcgtcgccatagtcctcatagtgattgtgttccaatggaagaaagttgcacagagcaaaaactcaattctgatcctggaaaaggagattgaactaaagaagatgtccatggtggaaaaagacatcgagagcaaacgcctcatggacaatccaattcccctgcctcaggagcagcaggacagtctttccgcaatcaggcagtctaccacggaggtgcggagtaatgtgggctatctgcacagcgagatcaacgagagattagcccggctcgaggccgaaaccgaacaacgaaagctggaaaagatgctgaaagagattgaggcgaaagagaagaagctttcgaagatgaacaagtga

SEQ ID NO: 9801 - DNA, 918 bp, synthetic construct
  source 1..918: mol_type = other DNA
atgatggaatcctatataaaggcgggcaagattgtgagcaagatccggagtgaggcttcaaaaatgatcgtcgatggagccctcgttattgaccttgtcaactacgtggagagtgagatactgaagaccggggccgagatcgccttcccctgcaatgtatcaatcaacgagattgcagctcattatacctcccctattagggatgaaactgcttttaaggcaggagacatggtgaaactagacttgggggcaatggtggacggctgcattgccgatagcgccgtgacaatcatagcgaacgggaatattgacgaaaattacagccaggacgagatcaatctccacgaggagatccaagaagcttctgccgccggccttgaagctgctatcgccacagctcgggccggaatcgaggtgtcgaaaataggtgctgcagtccacgaagccatcgcggagtaccacttaaacccgatattcaacctgactggccatagcttggagcagtacaacctgcatgccggcatttccatccccaattatgacaaccacgacaactacattctggaggaggggcaggccatcgcaatcgaacccttcgccaccaacggagagggtattgtcaatgatgcgcccgggcattatatattctcctacatggcaaacaagccattcagaatgaaaagcacgcagaaagttctgaagtacatccaacacaaccacagggatgtgccattttctggccgatggatcaccaatgaatttggagagcgcaagggcagcatcgccctgaagcagctctcagaatccatggcaatctacccatatgcccctctgcgcgaaaaagagaattgctttgtaagtcagaaagagcacaccgtgattattgagaaggaaggttgtacggtgacaactatctga

SEQ ID NO: 9802 - DNA, 852 bp, synthetic construct
  source 1..852: mol_type = other DNA
atgccactgggcaattataaggaagccatcagcgccagagctacggagaagaagatcctagacgtgtcccaggacggcggaatcgtatccgcattgttgtgttacgcactggatgagggcaaaattgaaggggccgtggtagccggcactcctgacgatgattggcgcccggttcccactgtggtgacctcatcggatgaagtcatcgccaacgctggcaccaaatattcaatgtcccctaccctggccgtcctgaaggaggctacccgccagtacgggctggaaaagattggcgtggtcgccacaccctgccagatccaagggctgaggaaggcacaggcgtacccattcacacggtttgtcgtgaataaaattaatttaatcattggaatctactgcatggagaacttccctatggcgagcctcgacacttttgccacggccaaactcggatttgacaagctgacagacgctacgaaaatggacatagggaaaggcaaattctggctaacaaaggatggagaggattccgggctgaagcttaaggagacacacggctacgaacagagcggatgtaacatctgcaccgactatgtggctgagtgggctgacataagcaccgggagcgtcggaagtccagatggatggtctaccgtgctcactcgaaccgatgatggtaacagtatcttcaaggaagcagtttctgcgggtctcattgagacaaagcccgtggacgacggcaaattcggtcttccgctgctcgaaaagctggccaagggtaagaaagacaagaacggggccgagtttgagcggagggcaaaaatgggcgtgagagttcccaccatatactga

SEQ ID NO: 9803 - DNA, 843 bp, synthetic construct
  source 1..843: mol_type = other DNA
atgtttgataagctgaagaaagcctttggcggtagcgcggagcctgccccaaaagtcgacgaaaaagtggaagaggtggcgcccgtcgagacaaaagcacccgctgaggagcccaaagccgcctcatccaagccacgaatcgggtacatacacctaagtgggtgcacgggagatgccatgagcctaaccgagaattatgacatcttatccacagtgttgactgatatggtggacattgtctacggacagactctggtggataagtggattcacggcacttatgctgaggaaatgcctgagatggacctgtgcctcatcgagggttctgtctgcctgcaggatgagcatagtgtacatgagctgctggaagcaaggaagaaggcggggctgatcgcagcattcgggagctgcgctattaccggttgtttcacgacctattccagaggaggccagcaagctcagccgagccacgaaagtttcctgccaatcggttcgctcgttaaggtggatgtggcccttcccggctgccctgtggctcccgaaatgatcgccaagaccatagttgccctgtgtgagggcgaccttgactacctcaaaccggcaatggattgggctgcatgcgacaaaggatgcgggtgcgacgtactgaccaacgtcgtgcgccagggactctgtaccgggtgtggcacatgtgccctcgcctgtcccacgcgggccatgggcttctccgaagggcggccaagctgcgacaaggacagatgcatcaagtgcggatcttgttacatgatgtgtccaaggtcatggttgcctgagggccgcattaagaaggaaacaggcctttga

SEQ ID NO: 9804 - DNA, 570 bp, synthetic construct
  source 1..570: mol_type = other DNA
atgccatacgacagcgacattatcgtgattggctgtggaaatatccttttcaaggacgatggctacgggcccatagttatcaatctgctccaaaagtatttcaacgacaagaacgattactatgatcccgcggtcacatcctatgtggaggacgagtttgacaagaatgttctgaaccagatcaaggaaaaatttgaaggggtaactttgccagacagtgtgcagtttattgatggaggcaccgcagcaccaatgaacttcttcccgctgtacaaagagtacgactggaaaaagctcatcgtgatcgacgtggtcgagtcaaacgccgaacctggcaccgtgggcatattcgatcctaatgctatgcaggtcggaaagtacgataacccgcacggtatgacggtggaagagcccctacagaagattagcgagaaatgcgaagttgtcattgtgggttgcaaacccgcctcgatcccaatacccgacatcgatgtggggctgtccgagagcgtcgaaaaggctatccctgaggccattgacattatcctgaaggagatcggggtaaaatga

SEQ ID NO: 9805 - DNA, 1215 bp, synthetic construct
  source 1..1215: mol_type = other DNA
ctgaaagacagagtcgtgataagccctacaacacggcaggagggccatgccgagctggtcatggaagttgatgatgaggggatagtgacaaaggggatgtacctgagcataactccggttaggggcctggagaagatggtgcttgacaaagcccctgagtctgctgtggtgctgtgccagcgtatttgcggggtctgtccaattccccataccctagcctccgccgaagcaatggatatggcccttggcatcgagatcccgaaaaatgcgaagctcctgaggaaggctacgctcgccgcccacaacattaacagcgcagctatccaccagtttttgattgcaaccgattttgtccccgagaacctgttcgccacagctgtggacagcgtgagtgaagtacgaaaaacagtgcaatatgttgtcgacatgattgctggggagggtatccacccctctgatgtacgcgtggggggaatggcgagaaacatcacccccttcaccaaagaaaggctgatcgaacgaatgacggccctccggccaaagctcgaggaacacatcgagctaatcaagaactgcgtggtggagaaggggctgcctgacgatttgggcgtaatcaacagaccattaatggcgactgacgcaacctacggaaccaacgacttcgatatggacgtgttctcagaagtgttgcctgaagcttggtatgacgaccccgagatcggtaaaaaggcctgctcggtgatcccactgatcaatggagagaatgttgaaacgggtcctcgggcaagaatggagaagtttgcgggcttcaaggggaaaggtgtaaatgcacagcacgtggcccgggccgacgagatgctcaaaaactacgacgcctgtatggaagccctggatgcaattgatcccgctgcgcccgccaaggtcagttatgataaacgcggaaccggcgaacttggctttggcgtgatcgagggccccaggggaaccaatgtccatatggctaaggttgtcgaaggaaagactaaattctactccgccattgtcccaaccacgtggaacattcctacaatgggacccgccactgagggcttccatcacgagtacggcccacacgttatccgcgcatacgacccgtgtctgtcatgcgctactcacgtcatggtggtggacgacgaggataagtccattctcaagaatgagatggtgcgcatatga

SEQ ID NO: 9806 - DNA, 528 bp, synthetic construct
  source 1..528: mol_type = other DNA
ctggacaaggcaaacataattatttcaatcattatcgtcctatgcgtggccgcagccgttgcggcgtatgggatcacaaacagcgataaccccatcttctctgacctctccagtatgtcagcaaacgacaatgatgctggaaacggaataggcaataatacagtgacggggaatggctcgggcaacacgattgccaccacatccgggtcaggaagtggcagcagctccagtagcagctccggtagcgggagcgggtccggctctggctccgggtcgagcagcagttccagctccggcagcggctcaggttcgggatctggaggcggctcaaacagcaactccaggacccacctgagctattcagaggccaaaagtatcgccaacgatgctatcgaggaagctggatgttacgccggcagtggtagctactctgggggctactggtactttactgtctatgatgccaacgggaataatgtagacaccatctccgtgaatgacaacactggtgctaccggacggggatga

SEQ ID NO: 9807 - DNA, 1179 bp, synthetic construct
  source 1..1179: mol_type = other DNA
atgctcgtaaacgctgactttcatgtgcacagctgcttctcaatggcatcaagcaaggacatgctgatcaagaacatggctgctaaaagcaagcttaaagggcttaatctgctgggcacgggcgacgcgttccatcccaactggttagacatgatcgaggagagtaccgtctattgtggggatggaatttacaacagtgacgatatgaattttgtgctgacaaccgaagtcgagggccgcaaccgaatccatcacctgattatcatcccaaacattgacatcgcgcgtgagctgtcctataagcttccctctaagaacaaaaagatcgatggtcggccaaagaccaacctgtctggaatcgagctgctggagttggtgcgggactatgactgcttgatcgggccagcccacgcattcaccccgtggacgggaatgtacaagtcctacgacagtatctatgactgttacgagaagagagtggacttcgtagaactcggtctcagcgccgacacgttcatggccgatcggatctccgagcttaaagactttcctttcctcactaattcggacgcccatagcccatggcctcaccgcttgggcagggaatttaatcaaatagagctcaaggatatctccttctcttcaataaagaacgcattcaagcacaacaagattaaagccaattatggcctggtgcccaacctaggaaaatatcacatgactgcatgcaccaaatgctacaatctgatagatcctatgatcgcccacgaaaacaagatgaagtgcagctgtggcggaaccattaagaaaggagtggactttaggatctcggaaattgccgactacgacaaacccaaacacccggcgttcagaccaaagtacgtgcatctcatgcctctggctgaaataatctccagtgtttacgagaaaggcgtcactacaaagacagttcaggggaagtggcagaagctgatcgataatttcggcacagagattgatgtgctaattaacgtcagcctcgacgatatagagaagattgatttaaatattgcccccgctatcaacgcctttaggaatggtgaaatcaacgtcattcccggtgggggggggaaatacggccagatttccttcgataaaataaagaaacaggataagatcgtgaccctggataatttttga

SEQ ID NO: 9808 - DNA, 771 bp, synthetic construct
  source 1..771: mol_type = other DNA
gtgaacacagcggagataaacattctcaaagagatcgagctggagaatcccattttcattgaagcattgccgggtctggggcatgtcggcaagctggccgcagaccacatgattgatgagttgaacgcaaccaagttcgctgaaatctattccccagcctttccacctcaggtgcttatcaaggaggatgggatcataggcaacatgctgaatgagctgtattacttaaaggacgttggggaggacaatctggacctgatcgtgctggtgggtaacactcaagcgctgtcccctgaaggacagtacctcgtctgtaaagacatcctcgattttgtaaaaggctacggaataaccagaatgttcacaatgggtggaatggctataccccagcccgtggagaaccccaaagtctacggcgcggcaagtgatgaggctacaatcgaactgctcaaggaagccggcattgagatccgaagcaacgacggggggatcgtgggcgccagcggtctgttcctaggcttaggcattaggcagggaatccagggggcctgccttatgggggagacgccaggatacttcatcgacgccgaatctgcagaggccatcctgaagaagctgtcactcctactcaactttgaaatcaatactgacaagcttgatgaacgcgctgaggaaacccggcagatgattgccaaagcccagcaaatggagcaggacttgattaacaaggctaataccggcaatgccgacgatctccggtatatcggatga

SEQ ID NO: 9809 - DNA, 162 bp, synthetic construct
  source 1..162: mol_type = other DNA
atgaagatgaacaaatgccctgaatgtggaatctacaccctcaaggacagctgcccgaaatgcggcgggaaactgaaagtcatttacccacccaagttcagcgtggaggataagtacggcaagtatcggcgcatcctgaagaaagaatccatgaaggagtga

SEQ ID NO: 9810 - DNA, 801 bp, synthetic construct
  source 1..801: mol_type = other DNA
atggtgcgaaaaagtcaagaatggccagacgagggggagttgatcgtggggacagtgtataaggtcctgaactacggggctttcgcaaagctggaggagtaccagggcaaagaggcctttattcatattagcgaagtgagctcaggctgggtgaagaacatccgggaccacgtcagggagaaccagaagatcgtgtgtcgtgtgctcagagtcaatcccaagaaggggcacgtggacgcttccctgaaacgcatccgggaggaccaaagaaccaagaagatccagcattggaaaatagagcagaaagctgagaaattcctggaattatccgcaaagagcctcgataagagtttggatgatgcttatgatgaagtaggctacgaactcatggacatctttggagatgtgtacggagccttcgaaactgcctccgaggagggtgcggggagccttaccgaggaaggaatcccgcaggattgggccgatgccattaccgaggtcgcgcagcggaatatcaccccccccgaagttcacatctcaggctatgtcgacattgaaactttcgtgcctaacggagtggagattatcattgacgcacttaaggccgccgaggacaatggcgacgaggaggaggaaattaaggtccagtgcgttggcgccccacgctacaggataacagtaaaatctacggactacatactggcggaaaaggccctgaaagccgcagctgataggtgcatcgcagttatcgaagagtcggaaggcaacggttcttttctacgcgagctggacaacaattga

SEQ ID NO: 9811 - DNA, 180 bp, synthetic construct
  source 1..180: mol_type = other DNA
atggtgtccaaagggaggggaaacttcctgaaagtaaaatgcctcgactgcgacaatgaacaggtgatatttgatcgcgcggccagcgacgtgaagtgtattatctgcggcaagacactggtcaaaagccggggcgccaaggctaagatcaccgcacacatcgagaaggtcctaaactga

SEQ ID NO: 9812 - DNA, 279 bp, synthetic construct
  source 1..279: mol_type = other DNA
atgaaaatcccaaaggaaaagagaacgtactgtccccactgcaaaaagcacacaatgcatgaggtgcacactgccaaaaagaggaaggcgagcgaactaacctggggacagcgccagttcagacgggtgaccgctggctaccgcggttatcccaggcctctgcccgccggcaacaaaccagtcaaaaagctggacctgcgactcaagtgcaaggagtgcgggaaatcccatataaagcaaagcttccggacagggaagccggagtttgtagcaaaatga

SEQ ID NO: 9813 - DNA, 876 bp, synthetic construct
  source 1..876: mol_type = other DNA
gtggatcaattttaccaggaactgcgaaagattcagaagaaggagcggaacaacgggaccctcgctcgggtcgacgaaaacttctacgccagtatccacgaatatctcgatgagctgaggcaggaagcaatccgcgatcccttctcgaacatccatggcatgcttaaagaagctcagattattgccacggagatttgcgaaagaagagaacataagataactgacgctgccgttgtaaacatccaccgatcatatcggctgttcaccgggaaacccaaatttgacctcgtggacaccacgccccttaatctgactcccgaagaggagaagttttacttctcactgttggataccctgaaaaaccacaggggaaacatctctctcgagaaattatccgacgacgatgagttcgtcaagcccaaagaaacccaaaccaacacactggtgccaaaacacgatgagatcaagccaaaggttagcaacctgacacacgacaatgaaagcgaggacgaggtcctaaaccggttggacgagatctccagggcaaagccactaaaaaaagaaccgttggagcctaaaatcgagagcaaaacaatgtccatcccaaagacgcaggccggcaatatccctgagaaaagtattgagataaaccctaatgccttcgacaagcaggatgaattttatgacctcgagagcaagaagctggcgcgcgatacagagcttgtgaccatgctggtgtttgatgagatcaatccgatcgtgggcgtggacgagaaggtctacggaccattccgccctcaggacctggtgactctccccctgataaatgcgaaggtatttttcaagaatagaaagggtcgtcagattaagatttga

SEQ ID NO: 9814 - DNA, 735 bp, synthetic construct
  source 1..735: mol_type = other DNA
atgtttaaggcagagctctccgactctagtatactaaaaaccagctttgatgccatcagctcgatcgtggacgaggtccagattcagacagacagcgagggcatgcggctagatgccctcgaccggagtcacataacgttcgtacatttggagcttaaatcaagtctttttgatgagtacgtgtgcgacgtgccagagaagatcaacatcgatactgatgagtttatgcgcatcttaaaacgtgccaagtcccaggacagagtgttgatgtccctggacgaggggaacttcatcatcacgttcgaaggcgacgctaccagaaccttcaaaattaggctgattgacatggaatacgataatcccgtgcccccgcagattgatcacccaacaaaattcaaagtccgctttagcatcctgaaggattgtattaacgacatcgatattttcagcgacaaaatagctcttcaagttgatgaagactacttcatggcatctgccgacggtgaatttggagacgcatccatcaagtatctgcacggagagaatattcaggagcatgccaagtcgctgttctcactggacaagatccgagaaatgctcaaggccgataagttcagcgaggaagcggaaatctccctgggcaatgacatgcccctcagcctcactctgaacatggtcaccggggatgggaagctgtcattcttgctggcgcctaggctggagacagacgactga

SEQ ID NO: 9815 - DNA, 774 bp, synthetic construct
  source 1..774: mol_type = other DNA
atgagcaaaatagctgatgcatttaagaacggaacggccttcattggctttttaaccgccggggacccgaccattgacaagactgtggagtatattctggccatggaagaagcaggttgcgatctgatcgagatcggcatcccatttagcgaccccatggctgagggtgttgttatccaggacgcaaatgtccgggccctgaagcacaacacaaccgccgatgatgtctttgggattgtaaagagggtccgggagaagacagacatccctcttgtttttctgacctacatcaatcccgtgttcttctatgggtatgaggagttcttcaagaaatgtggagaactgggagtcgacggcatcatatcaccagacttgccttacgaggaaaaaggggagatcaaggacatagctcttgagaatggtgtagatgtgattagcctcattgctcccacctccagtgagagaatcaagatgatcgcgggcgacgccactggcttcatctacgtggtgtcctcactgggggtgaccggaatgcgctcggagatcaaaacagacctcaacagcatactaaaagacattcgagaagtgactgatttgccactcgcagtggggttcggcatcaacacgcccaagcaggccgaagatatctccaaaattgccgatggcgtgatcgtgggaagtgcgattgtcaagataatcgaagagcatggcgaaaacgctacaaaatacctgaaagagtacgtgtcttgcatgaagaaggcctgcaacaagtga

SEQ ID NO: 9816 - DNA, 1185 bp, synthetic construct
  source 1..1185: mol_type = other DNA
ttgagcaaaggccgctatggagagtatggggggcagtacatatctgagacactgatgaacgagttgatttacctggaggaacagtacaaccactacatgagtgaccccggtttcgtcgaagagcttgacatgctgctcaaggagtacgcaggacggcctagcctcctgtactatgccgaaagaatgacaaaagacctgggcggggcgaagatctatcttaagcgggaggacctgaaccacaccggcgctcacaaaattaataacgtgttaggtcaggtgctgctggctaaaaaaatgggaaaaacacgcgtgatcgcggagacgggcgctggccaacatggcgtggcgactgcaactgccgccgcactgttggacatggaatgcgaggtattcatgggggaactggacaccaaacgacaggccctcaatgtgtaccgaatggagctactcggggccaaggttcacagcgtaaagtccggcacgaagactttaaaggatgccgtaaacgacgccttccgcgattggattgctcgcgtgcatgataccaattatgtcatcggctcaacaatgggcccccatcccttcccaatgatcgtgcgggattttcaagccgtcatcagcgctgaggcccgtgaacagttcctcgaaaaggaaggaaggctccctgctgctgtggttgcatgcgtgggcggtggaagcaacgccatgggcgccttttacaactttattgatgacgacgaggtgaagctaatcggatgcgaggctggcggaaagggtatcgataccccctacaacgccgccgccctgaccaaaggtaagatcgggatcttccacgggatgaagtccatattcaatcagagtaattatggccagattgcgccagtccactcggtgagcgcagggctggattaccccggagtgggcccggagcatgcttacctcagggacataggtagggccgagtacgttcctgtcaccgatgaagaagcagttaccgcctttgagtatcttagtaagatggaggggattattccggctatcgagtccgcacacgccgtggcccacgtcatgaaaatcgcaccactgatggacaaggaagatatcataatgatctgtctttcaggaagaggggacaaggacgtcagatccattgcggagtatcggggagtggaactgaacgagtga

SEQ ID NO: 9817 - DNA, 600 bp, synthetic construct
  source 1..600: mol_type = other DNA
atggtgaaaatcaagatttgcggtatcaaacgactcgaggatatcgagatcgtgaacaagtacaaccccgactatatcggatttgtgttcgccgacagcaagcggaagatttcgcatgatctggccaaacgccttaaggacaacttgaatagcaatatcctcagtgtgggtgtattcgtcaactcatccaaggacgagattctggggctgtttaatgagggcataattgaaatcgcacagcttcacggcaacgaaagtgaggaatacataatcgatataaaagaaaggaccaattatgagctaaaaattataaacgcgatcgaaatgtcacaggatatcgacctgctcaaatacgataagagcctggccgactatctattgctggactccggcaaaggaagcggaaagacattcgactggcaactgatcagaaacgatttaaaaaagaacttctttctcgctgggggcctgaacatccagaacgtccgggaagctattcacgagtgtaatccatacgcaatcgacctctcctctgggctggaaacggacggcttcaaggatgagatgaagattaaggagattatggaggttatcaattga

SEQ ID NO: 9818 - DNA, 777 bp, synthetic construct
  source 1..777: mol_type = other DNA
atgctgtgtgagattgtcgagaagactaaggaacgagtggagcaagccaagaaatccatccctcttgatgaaattaagaaggaagtttccagcatggagatgacagatgagttcccgtttaaaaaagcccttatggaggacggaatctcaatcattgctgaagttaaaaaggcaagcccctcaaagggtctgatcgccgagaactttgaccacgtgaacatcgcaaaagattacgagcaggctggcgctagcgcaatttcagtcctgacagagcccttctttttcatgggatcgaatgagtacctaagtgagatttctgaaaacgtgtccatcccaattctgaggaaggactttgtggtggacgaatacatgatctgggaagccaagttgctcggagcttctgccatattactcatagtgagcatactggacgtcgtacagctcaagaagtatttgaacctggcccacgacttggggctgtcggtcatcgtggagacccatgacgcagacgaaattcgcatggccatgatcgtgggggcggaaatcatcggggtcaataacagaaatctcaaggacttcacggtaaacattgagaatagcattaacctacggcggtgcgtaagtggcgatgttatattcgtgagcgagagcggtatcaagaccaaggatgacgtcactaaactcaaagaaaacgatgtggacgcggtgctgatcggcgagaccctgatgaaaagtaatgataagaggtccatgatctccgagctgaaaaacggctga

SEQ ID NO: 9819 - DNA, 1008 bp, synthetic construct
  source 1..1008: mol_type = other DNA
atgattaaagaagccatcctgaaagtatacaaaaatcaagatttgactcacgacgaggcattccaaaccatggacgagatcatgagtggtgaagccagcgaagtgcagatgagtgcctacttgacggccatgtccatgaagggagagaccataaccgagatcacggcgagcgctgaggctatgcgcgcgcactgtgtaaggcttctcaacgaccgggaggtgctcgagattgtgggcaccggcggggacggctccaataccttcaacattagcacgacctcttcaattgtgatatcagccgcgggggttcccgttgcaaagcacgggaacagatccgcctcaagcaagtgcggcgcagcggatgtcctggagcagttaggtgtaaacatctatattgagccagagaagagtatcaagtgcctggaaaaaataaacctatgcttcctgttcgctcagaattaccatctctccatgaagtacgtggctaatgtgcgtaaggaactgagtatcaggaccatctttaacatcttggggcctctgactaatcccgccggggctacaatgcaggtcttgggggtctacgaaaaagagcttgccgaacccctgatcgatgtcctgaaaaatctgggagttagctcggctgtgtctgtgtatggaatggacggaatggacgagataagcgccagcgataaaacttttgtgtgtgagctgaaagatggcaagacaatgtcctatgagatttcaccggaactgtttggcatggagctcgccagcaaggacgatctcgttgggggcaacgctcgggagaacgcagaaattacactgtccatccttaagggcgaaaagggaccacgaagaaatgcagtgttactaaactctgccgccggtctctacgtggcaggcaaggtggaatccctgcgcgacggtgtcgacctcgccgctgaggtcatcgactcgggaaaagccctgaagcagcttgaaaacttcatcgagtttacaaacagctga

SEQ ID NO: 9820 - DNA, 585 bp, synthetic construct
  source 1..585: mol_type = other DNA
atgattctgttaatagacaactacgacagtttcagctacaacctctaccagttgattggcgaagtcatgaaggatattcaggtgtatcgcaatgacaagatcacagtcgaggagatcaaagatctcgcgccggaggcaattgtgctgtccccaggtcccggaaagcctgagaatgccggcatctgtattgatgtagttaaggagttccatgacaagatacctatcgttggggtgtgcctggggcaccaggccatctgcgccgctttcggcggaaacattagccacgccaaacggctgatgcacggcaagtcttcgaaaatcagcctccattatgatttcatctttaagggactgccaagtgagatatccgtcggcagatatcattcactgagcctcatcgaggacacgcttcccgattgccttgagatcatttccaaggctaaagacgacggtgaaatcatggccgtgaaacacaaggaatttaacgtgtacggactgcaattccaccccgagtcaatactaaccccagacgggctgaccatcatcgaaaattttgcagaaaaagtggaaagggggatcttgtga

SEQ ID NO: 9821 - DNA, 1524 bp, synthetic construct
  source 1..1524: mol_type = other DNA
atgatgatgaaaatactgagtgatacgatgttctccccctcgttagaggaggtaatcgaaataggaaagaacgaggagtataagaggataccaatcagctatgaactattttcagatatcgccactcctattgaggtgttaagaattttgaagggcataagtaatcatacctacatgctcgagagcgttgaggactcaaagaagtggggccgatactcctttttagggtttgatcccctcctggaagtcacatgccatgacaacatggtgcacatccgcggggacaaggagttcaatgagctgactgatgaggaaacaatcattgagaccaatgtgcccagcgatgtgatcaaagaccttgtgtccaaaaataagtcgccaaagctcgagtacctgcccccattcacgggtgggtttgtcgggtattttgcctatgactacattaaatacagtgagccgtctctgaatctggacgccgagaatcaggatcagttcaaggacatcgatctgatgctgtttgacaaggtcattgccttcgacaacttcaaacagaagatcatcatcataatcaacatgaagaccgatgacctagaatgtaattataaaaaagcctgtgagaacctaaaaaatattgccaacttgatccgcaccgggaaaaaggcagaaatccagccactgaacctcaaatccgagtttacacccgtttttagccgtgaaaaatactgcgaaatggtcaagaaagctaaggagtacatctatgagggggatatattccaggttgtcctctcaaacagaatcgaggcagacatcagcggaagcttgttcgacacctacagggtgctgcggacaactaatccctctccttacatgttctactttagcagtaacgatatcgagatcgcgggcgcttcacctgagaccctggtgaagctgactgacaatcaactctacacatttccgcttgccggaacaaggcctcgaggcaaaaccgaagaagaagacttgatgttcgaaaaggagctgcttgcagatgaaaaggaactggctgagcacaatatgctcgtggatctgggtcggaacgacattggcaaaatttccgaaatcggctccgtaagtgtggacaagtatctgtctgtagagaagttcagccacgtgatgcacatcggcagcacggtcagcggaacccttcgcagcgatctggactcactgtccgcaattgactcgattctccctgccggcactctcagcggtgctccaaagctgcgcgcttgcgagataattaacgagcttgaaaacaacaagagaggaatctatgggggagccatcggctacgtggacctcagtggcaacatcgacacctgcatctccattaggatcgccttcgcccggaacaacaaggttttcatccggtccggggcaggcattgtggcagatagcgtgcccgataacgagttcgacgaatgtctgaacaaagcggccgctgtcattaatgctttgaagattgcggacggaggtattctgtga

SEQ ID NO: 9822 - DNA, 402 bp, synthetic construct
  source 1..402: mol_type = other DNA
atggacctcagaaaaataggcatcctcctaatcttcgtgggcattttcgtgacgatcttctttataaatgatgataaactgtttgtcccggccctcaccgtgacagttctgggatttttcgtaaccgtggtgggtttcgtcattgaaattaggaaacaaaagattaaaaacgaccggctggagaaggatatagagagcatcctgcagcccttgatcaccgagtatagcaaccttaacaagcagtaccgaatggactttcagggggatgaatacactcaaaagcgcattcagttaaaccgggacctggaaaaggaaatcacagacaagattccatacctggagagtagggagatcaagaagatcgtcatccagttctcccaggagcaggacaaaatgaattga

SEQ ID NO: 9823 - DNA, 777 bp, synthetic construct
  source 1..777: mol_type = other DNA
atgtcttcccttaacgagaagctgaaacttgttaccttaaagggtctgctgatcttcatttttttcatattcctaataaatgtgctcctgggcagcctcaacctgatccagatcaataacgcgtggatctatatcttcgtgattttctatttcatctttaaacttcgggagggcttcagcagtttcaagcacgacttcttaaaagtgttcacttttgaatcgctgaagatcatttccgccatcgtaatcttgaacgtctttatttcttatgggctgctgtacttgagtgactttatcctgaatgtctttcccaacctcaatagcatcgtgatgtcgagcgaatacatcaacaactctctgtttgttttttacggggtcataaccaccgtgtttatctcacctatttccgaagagcttatcttccgcggagtcttgctgaataggctaaacctcattattccgctggatttttcaattgtaatcacatccattttgttcgcgagcctacatagtttcggaagcattacggccgcattcattttcgccgtgtgcatggctgttctctacctgagaaccgacaatatactggtgccaatctttgcccacttcctcaataaccttatcgccgagattatcgtgattgctgatgtgggcaacatgttgttcacaaacaacgtggtcatgctgataatgtcagtgctcgcaatcatctccacttttctcatcctgatactgattaaaaagcagtggaacatactcaatatcaataagctgtga

SEQ ID NO: 9824 - DNA, 204 bp, synthetic construct
  source 1..204: mol_type = other DNA
ctggagacaagaatccgaaaattccgccaggagaagggcatgacccagcaacatctagccgagctggtcggagtgacgcggcagaccatcaatgccctcgagaacgctaggtacaaccccagccttctcttgagctatcacatcactaagattctggggaaagcagcgattgaagatgtgtttatattcaacgaagacgactga

SEQ ID NO: 9825 - DNA, 1350 bp, synthetic construct
  source 1..1350: mol_type = other DNA
atggctatacatccgattgaatttcgatatgggactcctgagatgaagaacatttgggaagaggaaaataaactgcaaaggatgctcgatgttgagtccgctctggcccaggcggagggtaagcttggcataatcccgcaggaggtggcggatgaaatcagttcaaaagctaacaccaagtacgtgaagctgacacggatgaaagaaattgaagcggccactaaccatgatattgctgcactgagcaagtcaatcaccgaggtatgtgagaacggcgccggggaatatgtgcacttcggcgcaacatccaacgatatcgttgactcctccaattcacttctgattaaggatagcattaacgtcctgaaggagaagctggagaagctcactaagatcatgctagacctcgcctccgaaaacaagatgaaagtctgcatcggccgaacccacgggcagcatgccctgcccacaacgtacggaatgaagttcgccctatgggcagacgagctccacaggcagtatgacagactggaacacgccgaaagcaatgtctgcgttggaatgatggatggggccgtggggaccaccgccgcactgggcgagcagggttgggaaatccacaagaccgtggccgagatcctcggtttgcccgctgcaacaattacgaatcaggtggtccagagagacaatcacgttgagtttatcagtgtattggctaatattgcatcgactttagataagatcggactggaaatcaggagcttgcaacggaccgagattatggagctgggcgagtacttcgatcccgaaaagcaagtcgggagtagcactatgcctcacaaaatgaatccaataacggctgagcggatctgcggcgtggcccggatcgtgaagtcctatgtcaacgcggctctcgacaacaatccactttggcacgaaagggacctgacaaactcgtcttgcgagcgcataatgtttcccgagagttgtattctaaccgactacatccttaacctgacaatcaaactgatgagcaacctcgtattctacgatgaaaacatcgagcgcaacctgaatttcacccatggtttggtgatggctgagcgcctgatggccgagttgacccgtgcaggcatgggaaaacagactgcctacggaatcgtgagaaagaatgccattaaagccaacaaagagaagctgctcctgggcgagctcattctcgaagacgaggaagtgaagaaataccttacgaaggaggacgtggacaaaataatggaccctcatacatataccggatctataccaaccatcatcgacgaattactggagaaaagcaaagagtggttttga

SEQ ID NO: 9826 - DNA, 2493 bp, synthetic construct
  source 1..2493: mol_type = other DNA
atggcctacctcaagcggatggatctgccaatagaaggaatgcactgcgcgtcctgcgtcttaagtgtgaacaagactttcggcaaaatcgaaggagtcgaggaagttgacgctgacctggcggcaaataggctccatatcaccataaatcctaaaaagatcagctatgaagagatggagcgattagtgaagaacctggggttcgagctgcactccgatgagatgaccctgagaatccaggggatgcattgcgcatcgtgtacgatgaacgtcgagaatttcctgatccgagtcgatggcattttcgatgttaaggccgacctgacaagccagaccgcgaagataagatacgactcaagcaaactggacatgaacgaggtggaaaaagtgatagagtccctggggtttgagcttctcggtattgaggggcagaccgaaatcgacgaggaagcaatttatcagcaggatctaaaagacaagctcacgcgaatcatcgtaggcgtcgtgtttaccgctattctcatgattctgatgtttagcggctgggacccactgatggggcccattgccagtcttaaccaggtcaccgggcttcatattagcgcaatgggactcctgtccttaatcgtgagcatcggccccttcatttacatttcactgccaatcttgaaggcaggatggaacggattgagccacaagaacttgaacatggacgtaatgtattccatggggatcatggtggcttacgtctccagcatctttggaacattcgggatagtattggaccacactttcatgttttatgacagcgcggtgatgctgcctgcatttttaatgattggaagatacctggaggccagggctaaaaagcgcacctctgactcaatccgggagctgatcgggctgcaacctacagtggctatttcaattgaagtcgatgagaacggcgagatcacatctcagaaggaggtgtctatagccgatatcgtcctcaatgacctcctgctggtaaagcctggagaaaagatccccgtggatggtgacgttgtgggcggagaaagctgcgtggacgaatccatgatcaacggggagccaatccctaaagtcaaaaaagacggcgaagaggtgtttgccggcactatcaatcaggacggagtgctgtacataaaagctaagaaaatcggcaaagagacggtgctctcgaacatcatccggctggtggagaaagcacagtcttcgcgcccgccagtgcaaaagttcgccaataccatcgtaagctacttcatcccagttatcctcacaatagctattgtggtcttcttgatctggtactttgtcctgggagaaacactgctattctcacttacctgcctcatctccatcttggtggtggcctgtccctgtgctctgggtctggccacccccactgccgttacggtcggcgtgggcagggccgctgaatttggcatcctgattaagaacggggatacactcgaaaacgcaggacagcttgacgtagcagccttcgacaagacgggcactataactgaaggcaagccggaggtggatgatatcattgcctatgccacttccgaggaggacttgattaagcttgtggctagtgtggagcaaaactccacccatcccattgcaaaggcgattgttaacaaagccaaggagctcaatattgagctcgaccagacgaccagttttgaaaatgtcactggtaaggggttgaaggctgagatcaactccaaagagattctggcagggaacctggccctgatggaaagcgaaaatgtggaggtgtcttcaaagctggctgataaatactacgagctggagaaattatctaagaccattattttccttgcggaagacaaaactgtgaaaggtattctcagtctatcagataagatcaaggaaaactctcggaggaccatcgaggagttgcacaagatgggtgtgcagacatacatgctaaccggagacaacgaatctaccgccctgaatgtggctcgtgaggtcggcatcgataacgtgaaagcgagcgtgcttcccgaaaataaactggagatcgttaaggatgctcagagcaatcacaccaagaaagttctgtttgttggcgacggcattaacgatgcccctgcactgacacaggccgacattggtgtggcgatgggtaacggcactgatatcgccatggagagtggagacgtggtcgttatggagggtgatctcgaaaatgtggtggccgccattcaattctcgaagaaggtcatgcgccgcatcaaggagaatatattctgggcttttgcatacaattccattctaatcccgatcgccgccggcatcctctatcctgccttcggcataacattcgaacccgctctcgccgggctggccatggccatgagtagcgtaacagtcataagcctttccttgatgcttaaacggtatgttcccgagataaagagaaagagtaacatctga

SEQ ID NO: 9827 - DNA, 792 bp, synthetic construct
  source 1..792: mol_type = other DNA
atgaagctgattatcgacacggaactatgcactgcctgtaaactttgctcccaggtatgtattcgggataacatctatgtcgatgactttgccgtggaaatgggcgacaattgcttcgagtgcggacattgtatggccgtctgcaaagtgggggcagtcacgttgaagagtttcataggtcatgaggaccgaatccaggagtataattcgcacgaaattcccgttaaatacgatgacctgctgcaactgctgaaacagagaaggtccatacgttggttcaagaataaaaaggtggacaagaagacctttgagaaattgttcgagggggcgtactacagcccaagtgctcagaacgaacaggacgtggagtttgtggttctcgacgagaaactcgacgagtttatggatgtcgtatacgatatcattaaggtggacgaagataaatttttccgcattaaggaatttggcgattacttaaaggacaactccaaaaagaagttccaccctttgctctgggaaggaaagcaactcattcttacattctcaacagataagaacaatgccgtgatcgcaaacacccggctagagctgcttgcgtatagcctgggcctcgggggattctattctctgtttatcctgaaggctgacgagatcaaccacgataagctgatggagtttttcccagacatcgataagaacaaacacatgtacagcactttcataatcggctatcccaaaaagcgcttcagacggaccatcccgcacagggacatcacagccacctactactga

SEQ ID NO: 9828 - DNA, 1215 bp, synthetic construct
  source 1..1215: mol_type = other DNA
atgcagaccctaatcgagaacgtaaatattgtgaaccccggtgacgacataaagacacatcagaatatcttgattgaggacgccctgattaaggaaatctctcaggataagctatccactaaggacaatgtgaagatcatcgatggcgaggacaattacctgcttccgggcttcatcgattgccacacccacatcttcgccaaagggttccacaaggaggagaacatgaccaaccctctcggaatccatttctataatgccgtgccccattcgttgcagaccattgacgcgggggttacaaccatcagagattgcggcagcgcagacctcagtttcaagctggcgcaacagcgcaagctgttcaccgctcctaagattcacttatctgtgacgcctcttgtcatcaccggaggacatttcgacctgcttctcccaagcgggtgggatatggagataatgtatcccgggttcccaaaaggacggtgtgacggcgtcgaggaagtgctgaaaaagactcgggaagtcaaacgcgcaggtgctgattttatcaaggtaatgtgctccgggggcgtgctcacaacgaacaattcaccagagtttgcacagtttaacaagaaagagttgaaaacaatcgcctgtgaggctaacgccaataacatgtcagtgtctgcccattgtcactccctgaagggcatgaacaattgcatcgatgttggcttttcatccatcgagcacggaacattcattgacaggaaaactgcttgccgaatggccgaaaatgatgtgagtctggtcccaacacttctggtgcaccagtttctgtacaaaaacggttttcccgcctgggacaactacgccagagaaaagaccgcaaagttaaaggagatagttaaagtccacaaggagaacattgccgctgcctacgaagagggggtgaatatcctcatgggaacggattccggggtgatcccgcatggtcacaacctcgaagagctgattcacctgactgatatcggcatgagtgaaagcgaagcaattgccagcggaaccgtgaacgcagctaaattcctgggcaatgacgacctcggcaaagtaaggaagaactgtattgcggatttggtgctggtcaattcgaacccctttgatgacatcagcatactcagcgacaacgacaacatactgactgtcatacaagacggcattgtggttaaatga

SEQ ID NO: 9829 - DNA, 390 bp, synthetic construct
  source 1..390: mol_type = other DNA
atgattacatgccggaatattgcaaaaggcaaaggaaagggtgagttgatagtcagctccgaaccaattagtttcctggggggcgtcgatcctgaaacgggcatcgtgatcgacccgacacacgagctcaagggagagtgcattaaagacaaagttctttttattcctggaggcaagggttctactgtggggagctacgtgatattccagatgatgaagaacaataccgcccccaacgccataatctgtctaaacgctgagcccatcatcgcaacaggcgcgatcatgtccgatatcccaatggtagactcacccgcccagactaaggacctgaccaatgggaccctggtggaggtggatggggacaacggaaccatcgaaatcctctga

SEQ ID NO: 9830 - DNA, 1266 bp, synthetic construct
  source 1..1266: mol_type = other DNA
gtgataatcatgctgaacgcgaacacgtacgtgacagcccaggagggtattgggggcaccatcaggaaccagtacgaggatttctacgtcgaagagattccggagatcattcccgacggagaggggcccaatgtttacgtctggatcgagaagctgggaagaactacattggatgtcgttttggatatcgctcgcgacctgcatatcagccggaagcgcatgggctttgcaggaatgaaggacaagaaagctatcacaaggcagtggatctgcatcgccaacatggactccgaagaacagtttaagcaagtcgaagcgctggatatttacaaaacggatttcctgaagaccgttcgaggtcgtaagaagcttagaatgggccagctccgaggaaacaaattcagaatattagtgaaagacctcaaggatatcgagaagagcgccgacgtggcaaacgaggtgctcgacgaactccagcacaccggggtgccaaactacttcggctggcagcggttcgggaagccacggaccataactcaccttgtgggggaagcattggtcgaaaatgacctggagaaggctgttggagtgtatatcggtaaccctcaggaggacgagtctgagaaaaaccagaaggccaggcaggcatacgatgacggaaatctggaagaggccttcaatctgatgggcaaggggatgcggtatgagaagatgatgctaaaagagctcgtcaaggcctccaaaaaaggagagctcacggacaaagactatatgaatgccctacacgccctgcccaagccgctccagaggatgtttgtccacgcttaccaaagctatcttttcaatgaagcggtcagtaagagagtagagatgggcattaacaagtacatcgagggcgacatcataattgacacagaagagcatatcgtgcgagacaagactcctgaggaatttcaggaactgattgataacttccaagcaagtcccacctgccccctgtatggcacaaaggtgccttttgccgaagatgctgtgggcaaaatggaggaggacatcctgacaaattataatattaccaaggccaacttcgaggtgccaaaaatgccacgcttaggcagccacggtcttcggaggtcaatgcgcttcaaagtatgggatgcatccgctaccgccaccgatgagggggtgctgtgtgaattttcgattgacaaaggctcatacgccactgctgtactgcgcgaaataatgaaaaaggatgtgatctga

SEQ ID NO: 9831 - DNA, 438 bp, synthetic construct
  source 1..438: mol_type = other DNA
atgctcgatgaaaaaggatatttctacatcattgatgccattcttgctgtgatcctggtcagcatagtgtttctcgtggtaaacacggcaatctccatccccagtccagactactcttacgacagttgcgagtttcgcaccgcccaggatgtcatggaaatcctaagcggcaaggtgaatttcaccgacaggaccttcattggggagatatccaaaatcctgaaagacaacaaaaatagcaaagagtctattaacctggttagcaagatctgtaagaacaagttcaagagtttaaatctgacaaactatagatttactgagaacaagattctgaaggaaaagatcttggacagctcaggcgattactccaagagcaatatggtgtcagtggcgacacggaactacgacgactattcgtacactctctccgtctggtga

SEQ ID NO: 9832 - DNA, 1365 bp, synthetic construct
  source 1..1365: mol_type = other DNA
atggacattgagggattcgtccgcgccagaatcgatgactacgactacaacgacctcaccgagcttttggctgtaagaatccgagagtataagaagatcagcgagaagaacagcgtggagatggccaaagcggtcatcgatgaggtctccactacgctcaagttgcaggagtgtggcgatgagtttctgaaagaaatagcgaatgttaacaaggccgacgttctgatgggggaaatgggcgtcggctctcgcggcgccggggacttctttgtgcacagaaaaattgccgagattgtcgcctcaaccaacacagccagcctcataaatccgtccgaacaagatgacggtggggtggtgaaggccaaggcaaacaacgacgatgtgtacattaccacggcagtcgatggcatccattcacggctgagcgaatatccctttctgggggggttccatgtcacccgagcgaccctaagggacgtttgcgtcatgggcgccgaccccgtggccattctgagtgatgtccacctggcagatgatggggacgtggccaagatattcgacttcacggcgggggtggctgctgtatctgagctcgtggatgtgccaatagtagccggcagtacactgcgtgtgggcggagacatggtgctgggcgacaggttcgtgagcgccgttggcagtgtgggtgtttccaaccaccctccgaccgcacggaagggagcaactgacggcgatgtcattcttctgacagagggcagcggtggaggaaccatcacaaccacagctttgtacaatgggttctttgacgtggtgtgggataccatgaatgtaaacttcgtgcaggcttcccatgcactcttcgaggccgatctcgtaaaagacattcacgccatgactgatgtcaccaacggcgggctgaggggagatgcgcacgaaatcagcaatacaacgggggtgggtctggagttttacgaaaaagaaatccgccagatggtggctccaaatgtcctcaacatgctggaaaccctgaacattgaccccctgggagtgtcaactgacagtctaatgttgatcgcacctcccgagatcgtgggcgatatcaagaaagtggtgggaaaatatgacgtttccatatctgaaatcggtgaggtgaacactagcggagaaccaatcttaattaaagaagactcctcggaggaaaaacttgttccccttttcagggaggctgcttacaccaagatcaaaaagttagttggtgagacaactcctgaggactttgaggaaatgaaggagaaagtccagcgggcttcggacgccgccatcgctaagaaggaaaaggtgatcaatcacattcgggcaaattga

SEQ ID NO: 9833 - DNA, 597 bp, synthetic construct
  source 1..597: mol_type = other DNA
atgatcacgattatcgattacaagtccggcaacctgaaaagcatctccaacggattcaagaaaatcggtgccgagtacaaaattagcgatgacaaagaggtcatcgctaacagtgattatctggtgttgccaggtgtgggggcgtttggaagtgcaatggagaatctcaagcccttccgggacgtaattcacgagcacgtcagcgaagataaaccatttcttggcatttgcctcggccagcaggtgctcatgtccagcagtgaggaagcagacggtgttaagggactagacctgttcaaaggacatgtggagctgctgtccggggacgttaagatccctcacatgggctggaataagttaaagatatgcaacaattcacccatcctggaaggcatagacggggagttcttctacttcgtgcattcgtaccacgtggtcccggacgatgagagcattatcgccggcgtgtgtgaatatggggggaaaatcgtcgctagcctgagccaaaataacttgttctcaacccagtttcaccccgaaaagagcggcatagccggactgaagattctgaagaactttacaaacctcgagctttga

SEQ ID NO: 9834 - DNA, 1074 bp, synthetic construct
  source 1..1074: mol_type = other DNA
atgcacccccgtcccagcccaatcgccgcgtccctctacactctgcgcgacatgaacgtggacgttattgtgatgcacgggcccaacggttgctgctttagaacgggaaggctgctggagagtgacggcgtcagggtcttaacaaccgcaatggccgaaaacgatttcattttaggagctggcgagaagctcgaagagacgctcaaaaaagcgtatgacatgtttaagccagaattgatgggtgtggtaggcacttgtgcaagtatgattattggcgaggaccttaaagaggccatcgctaacgccgacttgccgtgcaccgtaatacccgtggagtcccatgggggaagcggcgaaggggacaacacagtgggtgcgatcatggtgcttgaagccgccgtcgagtgtggggtgatacctcagggggaggcggatcgacaaattgaaatgctggagaaagccaccgaggtggaaaaaacccggggaatggcacagggaaagtacattaagcctaactttggcgattcgaaggagaatgttgctaaactggtagttcgcgccatcaaagatggcaagaaagtcgctttcgtgcataacgctaagaaggagaccgcatatctgttcgccgatattatcaacttcgactacaaggatatccgccgggacaataagcctatcattgtcgccaatctcgacggcagcactggcctggaacgaatcagatgccacgcaaagaacatcaaggaggaattgccgatggaaatcgactttatcacaggggggcttgatgagtatcctatcaccgccgacgtggcagctgaatacctgaaaaatatggacctcgacctcatcgtggtcttcggcgtcccacacgctttcccaatcgaggacttcgatgtggagtcagttgccataacagacgggccccggctggtggagcccctgagggatctaggttacaatcatgtggtggctgaactggatgcccactcaaagacgctgggaaccgatgagattgtcttctccgactttggcggtatgataagaagcgccatcggatggctagatgagtga

SEQ ID NO: 9835 - DNA, 402 bp, synthetic construct
  source 1..402: mol_type = other DNA
atgatgaagctcgataaaaaaatcctggaggaaaagattcgggagtacagggacttcaagagttgtagcgagtcaacgctgatggggctgtgcgaggctgccgagtatccaatgagcaaagccgaaatgtgcaagatagcatgcggcttcgccggcggaattgggggaacattcgacgaagggacatgcggtgcggtaactggcgctcttattgcgaatggtctcgtgctagacaatccggttaaaatcaaggaaaacgcaaaggagatctttaattcttttaaagaaaaatacggaaccgtgtgttgtggcaagatcaccaacaacggcaaggataagtccccctgtgtcgactgctgcgtcttcatcgccaacaaggtggccgatttgtgggacgagtga

SEQ ID NO: 9836 - DNA, 486 bp, synthetic construct
  source 1..486: mol_type = other DNA
atggatgaaaaacacttgccgctatttggcgtgggcccttatctaatgggactgattatcatcatcacctttctcagcattgcagcctccatctacaaaatcataccagtgtacaacatcaataagctcaatatcttcctgattaccctggggataatttcgatcatttttgctatcgtactgtggctgctggcgatactcaatagtaagttgatgaagaatatcaagaacaacaacctcgtcacaactggagtgtattccttcgtcagccatccaatctacgcctgcttccttttcatcagcatcggcctgatcttaattagccagaacatcctgttgttctttctgccctttcttttctgggccttcctgacaattagtctcattaagacggaggagaagtggcttttcgaaaggtatggggacgagtacataaagtactcaaagaaagttaaccggttcattccctttaaaaaaatattctga

SEQ ID NO: 9837 - DNA, 906 bp, synthetic construct
  source 1..906: mol_type = other DNA
atgatcgagaccattatcattatcgtcatctttctcgtgtacattgcaatgaaatacgtgaagatcctcaggccctacgagaagggcgtggtggagcgcctcggaaagtacaaccgaactgtgtccagcgggatagtggtccttatcccattcctggagaacttagaaagggtggacctgcgcgaacaggtggtagatgtcccgcctcaggaagtcatcaccaaggacaatactgtggttgttgttgattgcgtcatcttttatgaggttgtagacccattcaatgcaacatataacgtagtgaacttttatcaggccattacaaaacttgcccagaccaacctaagaaatataattggggatctggagcttgaccagaccctcacgtcgcgtgagatgattaacgccgaattgcgggaggtcttggatgaggctacagacaaatggggctccaaggtcgtgcgggtggaaatccaaaaaattgaacctcccaaggatatagtggaggcaatgagtaaacagatgaaggctgagagaatgaaacgggcctcaattctcgaagctgagggctacaaacagagcgaaatcaaaaaatctgagggggacaaacaagccgccattctggaagcagaaggcaaggctgagtccatcaagaagatggcggaggccaagaagcaggcgctgatcctggaggccgagggcgaaagcatggccatcgagaaggtctatgctgcaattcacgagggaaatcccgacgacgggctgatagcgatcaaatacttggaaagcctggaaaagatcgccgatggaaaggcctctaagatcttcctgccattcgagtcaagcggtgtgctaagttccgtggcaggtatagctgagctgttcaaggaggacaagaaagaatga

SEQ ID NO: 9838 - DNA, 408 bp, synthetic construct
  source 1..408: mol_type = other DNA
atggaaatctttatctggatcatcctggctatcctgttcttcctgctagaaatccttacaggaagctttattctggtgtggttcggcataagcagcatcgtggcagcggtactcaattactttaaattcgatttctacacccagtttggggccttcatagtcatctcaatcattttgctcgtgttcaccaagaaatttgccattaaggtcacacccgagatcaacaagaagaccactgcagaaaggctgattggacgcaacgctaaagttgtgcggaagattgacgataagaacattattgtgaaggtctgtggcgaggagtggtccgcctatgccaaaaacaatgtggacatcggggacacggtgaaggtctgcggcatagagagtatcaaactcatagttgagtga

SEQ ID NO: 9839 - DNA, 216 bp, synthetic construct
  source 1..216: mol_type = other DNA
ctcggaatcatcatcaagagcctgaagtacttcatttatctacagattgaggcattcaaccacgaatttttcaggtggcccaagcggatggagtactggaagaaagccctcagtatcatcattttcttttgtattgggctgatactgatggatatgatagcttgcggcgaccttccagacaaaaataccgcctccagctttatgttctacatctga

SEQ ID NO: 9840 - DNA, 315 bp, synthetic construct
  source 1..315: mol_type = other DNA
atgaaaaaagtaaaaatcacagtcatgcggaaggtgaggcacgacgatctcatagaagagtacgaaaaccctctagagcatgaatgcagcgtggaggagggacaggttttcatcgcaaatggctgggcccgcccggacgatttctgcgacagtgcttgggagtcgctttcacccttcgtgatggcactggcgaatggcgctagcgacttctatgacgggtggatgaagaacaagaagtccgccatgatttcctgtaacgacggttttagaccagtcagctttctgctggagaccctcgacgaagatgccgattga

SEQ ID NO: 9841 - DNA, 1191 bp, synthetic construct
  source 1..1191: mol_type = other DNA
atgctccagattgccgtttgcggcaagccgaacgtggggaagtccagcttttttaattcagcaacggcctcgaccgtcgaaatggcaaactaccccttcacaaccattgatgccaacaaggctgttgcgcatgtcatcaaggattgcccctgcaaggagttggaggttacatgtaatcctcacaacagcatctgtattgacggaaaaagactccttccaattgagctgatagacgtggcaggcctggtgcctggagcccatgaaggcaagggcctcggtaacaagtttcttgatgatctgatgcaggccaaggtgtttatccacgtcatcgacgctagcggttcaaccgatatcgagggaaaccctgtcgatcctggcagtcatgacccactggaagacattcaattcctcgaagaggaaatagtgatgtggatgtacggaattttgagcagaaactgggtacggcttatacgaaaagtgggtgccgaacatttggatatttccaaagtgctgttcgaccagctgtccggcaccggcataactatcgaggacatcatcgaggctaagaggaatatcgagccagactacaataaatgggaggagaaggaccttatagagctgacacgcaacatcctcaggatcgccaaacccatgatgatcatcgccaataaggcagacctccccactagcgccgctaacatcgagcggattaaagaaaaatacccctacgtgatccccacctccgcggaaagcgagatcgctctagtgcgtgccgccgaggctggcctgataagctatattagtggggatgaccacttcgagattctgcaagcggacaagctgaaccccaaccagctgaaagcactcgaatacatccagacgaatatcctagacaaatatggcagtactggggtccagaaggcgttaaactatggaattttcgaactgctggataggatcgtagtctacccggttcaggacgaacacaaatataccgaccagaaggggaatgtgttgccagacggattcctggtgccaaatggtgccacccctcgggagctggcctacatcgtccacacggatatcggggataagttcatgcacgccgtggatgcacgccgcaacatgcgagtggctagcgattatgagttaaaggacggggacattatcagcattgtaacaagagggtga

SEQ ID NO: 9842 - DNA, 870 bp, synthetic construct
  source 1..870: mol_type = other DNA
atgaaaaactacgacactgaccgtcctccagccatgaagattcgacagggcatccaggacgctatgacctacagtctgcctgacaagaagtttgagcccagtgagatcgacttggtcgaggtagacattaagctgaataatctgggctggaacttccacaactttaagatcttaaacctaacagacatccatctcggtcaatggattaatcccgaataccttgacgagctgatagattatgtcaatatcctgaacgtcgacctaattaccctgacgggagattactttagctacatcacagaggggtatgagaagtccctcactgactctttcaagaagctcaaaagccggtatggaaaatttggggttttgggcaatcacgatcactggatggatgcgtccaaaattcgcgacatatttaagagctcaaagatcatcgatctgagcaataaggtttatactctggaaaaggaaggtgaatttctcaatatctgcggggtggacagctgcacagtgtgcgcagataacctggatgaggtgctggtgaaaatcagagaagatacgccaagtattctccttgcccacgagccagacttcgccgaggaatcctctaagaccaacaagttcgatttgcaaatctcggggcatagccacggcggacagttcattatcccgaagttcgagaccacccccttccgggggccgaactccaaaaaataccccgtgggcctctacaaagtgagaaatatgatacagtatacaagcaaaggcctgggaacgaactcattcaggatgaggatcaactgtaagcctgaaattacaataattacccttaaaaccaaccgcaagcagaaaatcgacgtgaagtga

SEQ ID NO: 9843 - DNA, 2121 bp, synthetic construct
  source 1..2121: mol_type = other DNA
atgaacacccacaatatcataacgagcacaaagaacataatcaacctgatcctgctggttttacttaatatcctagtgataatcctcatgtccgatctgtacggggacttctccatcggcccgtggtataatgcttttttcatagtcctctcaatcaccatagccaacaccctgctatggccaattttcaagcgcttttttatgaagttcatgatccagactttgggcattggtaccatctttattaacgcactcatcttctatattgcgtgctacttcatcccgaacgttgacgtggggttttatgcttccatcaaggtgcccttcttcatgagcattgccacaactgttgtgactaacatgacaaacacgaattactacaataggcacctgaaaaacattgtaaagtacgcccttaacaaaaaaatcgattcaaagagctatccgggcattatcatgctggagattgacggactgagcatcaacatcctcaagaaggcaatcgacaataatataatgccaacaattaaggagtggattgacagcagtactcataatctcaaggagtgggagacagacctgtcttcccagaccggggccagccaggcgggaatattgcacggaaataacgaaaatatcgtcgcttatcgctgggttgagaaggaaaacgacaacaagatcatcgtttccggaaagttaagccatgctccactcatagaaaagcggatcagtaacggggaaggattgctggtggacgggataagcgtgagcaatatgttttcaggagattccaaaagcgcacccttgacgtcttccaaattggggactctaactagaatcaaccataagaccctcaatactgtcttcctggacacgtacaactaccaacggatcttcaccctgttcttatgggacatcctggtggaacttaagtcacagattaaacatctgattaaaaacatccaaccacggcttaggcgcacagtggtgtatgcggctgtgcgggctggggccaacgtagtgcttcgagaggttaccacggatatcctgacaagtgagatcctgaagggcgagattgatactgcatacgcaaccttcatggggtatgacgaggtcgcccaccactctggaacccaggatgaggatgtgtggcccgtcctgaaacagattgacactcagatccagaggctcacaaacgccatcgacatgagcaacaggggctacaagcttgtgattctgagcgaccatggccagagtaatggggccacatttaagcagaagtacggcattaccctcggaaattatgtgagaagattccttcccgatgatctcaaggtgtatcggaatgagtttaacatcgaccactttcgagatgccgtgttttcggaaaatatcaagctcaagatcgtcaaggagaaaatcggcgatttccgtgacgacatattcgatgagaacacctactttcagaacattagagacgaactggagaacaagaagcctgccattattttcgataacgagcaataccagaacctgaggaaaaaatatagcaactccctggaatacattaagggccatgagagtatcgagcagagcacgaaaaaagccaaagactctgaattgattgtcttgggttcgggaaacctagggctcatatatctcacagagtggaagcagcgcctgacctatgaggaaatcgtgatgctgttccctgagttgatacccggccttgtaaaacacccaggaattggcttcattctcgtacactcaatcaccaatggcggcatggtgatcggggaggatggaatctactacctggatacagacaagatcatcggtgagaaccccctgattaattatggcaaaaatgctgcacgccacctcaaacgacagaacacctttaacaatatgcccgacatcatggtcaatggtttctacgacgaaaagtacgatgaagtcaacgcgtttgaagagctgatcggcagtcacggtggtctgggcggggatcaaaccaaacctttcatcctgtacccttccgagtgggaagaccctggtaaactgattggcgcctcctcaatttacgagtttttaaagaaagaaattaatgaactgaagtcgtga

SEQ ID NO: 9844 - DNA, 852 bp, synthetic construct
  source 1..852: mol_type = other DNA
atggacaatttcaagcaaaggcttaacaagtccaaggaggccattgataacgctgactatatcatcatcggggccggcgccggcttcagcgcggctgctggtatactgtattcgggaaagcggttcgaagataatttcaaggatttcatcgaaaaatatgacatgaaggacatgtacagcgcagggttttatccattcaagactcaggaggagaaatgggcgtattggtgtcgtcatgtgtacgtaaatcggtactccgtgggaaagaccgagctgtacaagaagctgttcaatctcgtgaaagataaagactatttcgtcttaacaaccaatgtggagcaccagttttggatcaatgactttgaggataagcgcatcttcgcaactcagggggactacggctcaatgcagtgcgagaagggatgccacgataaactgtacagcaacgaggacttcgtttacgaaagcctcggaaaaatagaaggctgccgaatcccctctaacctggtccctaagtgcccggtgtgtggtgggaacatggatctcaacctcaggaaagaccagttcttcattgaagacaaaaagtggcacgagatggccagtaactaccagaattttctgtcccgcattgacgaggacaaaaacattgtcctgttggaattgggcgtgggctttaacacccccacaattatcagatacccctttgaacaaatgacatacaataacaaaaacatgacgctaattcgccttaacagggactacccagatgccatcgaccagaacaaggaccggaccatcagttttgatgaggagatctatgaaatatttgattactggctgtcaagattttga

SEQ ID NO: 9845 - DNA, 642 bp, synthetic construct
  source 1..642: mol_type = other DNA
atgcagactggaaagattttcatcattgggatcgggccgggcgcttccgaatatctgactaagaaagccatcgacactgtgaagaccagtgattacaccataggcagtacgcgggcgattgagctattcgatgatgttcaaaataagatcgcatttaatgtcaaggagctccttgagaaattaaacgagggggtgcaactcgcctgcaacggcaataccgtgagcatactgtcaacaggagaccctggcttttcgggggtgctgaacacggtgctgcggatcagcaaagagaaagaatttcccaacgaaaacattgaagttatcccaggcatcagctccctgcagctcgccgccgcaaaatgccacatccagtgggacaacgcgaacgtcatgacattccacggtcgagaaaatatagaggacatcctcccagtcatcaacaatggaaagacaaccatagccctgcccagccgcaaagtcaaggacatggcccagttcttgcttgaccatggtgtagaagaaaataggaaggtggtggtatgcgagagactgtcctatcccgacgagaacattgtggaggctacattgaaggatatcgcacagtcagagttcacctacatgtgtattatgatcatttactga

SEQ ID NO: 9846 - DNA, 2811 bp, synthetic construct
  source 1..2811: mol_type = other DNA
atgaatgcgaagctcaacaccacctgcttcatcttgttatttattttcctgattaccgccgtctcagcggcggacaataaaaatgagacactcctgacgcagaaggagacagattccagtcagaagctctgcaagtcctccgttagtaaggagactagcaagaaggagaaggtcactcttaaggcacctaatctgaagatgtattataaggatgggagcaaattcaaggccaccgtgaagaacaagaataagaaggccatcacaaaggcaaaagtggattttacggttaacggcaaagtttataacaagaagactgactcgaaaggtgacgcttacctgaccattagcagcctgaagtccggaaattatcccattaagatccggttcgctgggacaacgaaatacactgcaatctcaaagaagagcacaatcaccgtgaaatccaccatcaaaagtaacgatttcaagaaatactacaaaaatacttcgccctacacgtctaaattctataatcaaaagggcaatatcctgaaaaacaaagccgtgaagttcaagctgaacaagaaacactacacggtgaagaccgacaaaaagggtgtgggaaagctgccgattaatttaaagcctggaacctacgccatctccattatcaaccccaagacatctgaaacggtcaataagaaaatcacgatcaagtcgctcattaaaacgaaggatctaagcatcaatgggcaaaatgatggtaagttcaatgtaaaggtctttaataacaaaggcgaggtctatccaaatcagaaggtgacatttaagattaacggcaagacttactcaaaaaagactaataagaatggcattgcaacactggacatcaatcttgatgtggggaaacactcaatcacaaccgagtacatgggtctgaaaaatactaacaaaatcaacatcaacaaaatagtgaaatcaaccaactatatccacaccaccctgatcccaaactacgttaatgttacagctaagtatgtggtgaataactctgtttactgtcttaaatctggcatcaacggcatcataaagatgccaaagaacgaaatttttaaaattcaggttgggggaaaaatctacacctttacaaccactagcattaacggcataaactccatcacgctccgatacaacaacaattacctagtgcccttcgacgggagtggcgtcaaaagttacacgaaccgaaacaagctgaccagcgacggcataattattagcaaggtaaatgactacacccagattgactatcagagcaagacaaaagataacaccgctctcttcggattctacgctagcaaggggctggacaaaagtgaaactttaacatatgtggagaatgacaagatcactgccaagatcaacttcaacactttgtcctttgacgaatttagcctccggtactcgctgtctgcattgcatggcaaaacaatttataacttcaactatggcaattacaatgacaccatcagatttgcgaacaccaacactcccgtaacattttcctattttggcaatagcatagtcggatacgcctcccaagaaaccatcataactaagtttaaggtggacgagatcaaggaagtcgagaaggaggagaacataagttacggcctgaataaaaagtataggacggccatgggcttcgaagtgctgcaatcatacactctgatcaacgaaaaaattaaccagaaaacgctggagaattgggtgcttaagaatccggactatttgtcgcgtttcggcgtaatgaacatttatggaatgcatcttgcctctctggaggtcgcttggatcgcagatataatcgccgataagagctccaaggaactgaacgtgaattggaaaaggaacaacaccctaaccatcctgggtggaataaacttggaggacacttatctcaatattctcaacgccgacatgggtatgaaggtcacaggcaaatttgacaacgccttcctattcaaactgctcaacagcatgaacctgcccaatattgaggaatacgccctcttgaaagttgcctatagatacttggataaaagtagcaacagcctcgacaatgtctttctgtccattctcaaaaacaactttagcatcgcccagctcgatgacatgatttacatattctcagaagcaaatagcaagtctgccattatcctgaacacaagcagcggggtgagcagcgtagtgctagctcagaactccgtgtacaagggatcatcactgaagaccacccacgactgctgcggtgtggggattatccccaaagacatcataaaagggattaaggaaaccttcaacatcatcaataacggactgagcaacatataccccaataagacccaccctattagtaagctcttctacatggctgcgaatttgcttgccaagcctctgaacggggtgggaagcttaggtatgaacctgatcacaaccatggctcttatccagtccggcggcaccacctaccgcaacgagatggtggagaagtccgattggcatgaggtgatggataagattactttcacacggccaggataccttcagtcaaaaaaaatctacaacatcccgaacgaaaagggagggtgtgatttcattgaggtcaaaatccgcgacgacatgaccctggatcgcaacaatgcaatctatatatccgacgggaaaaccagaaagctgagtaaaacagagacttacaaatatttcatcgatgactactggacaccatttagtatgcctcagaagtattgggataagtcctggaacaggtga

SEQ ID NO: 9847 - DNA, 330 bp, synthetic construct
  source 1..330: mol_type = other DNA
gtgataaaaatcaagaaagaaagcaagttcaccgtatcaatcataatcatcctgtgcgcgcttatcgctataaccctagtctaccccaagtattccgctatctgggatgtggcctttctcattagtattttctacaccagtacacagaccattctggacacttccaagaaatctaagcggaaattaaacattaacatcgtgattatcataatcttcgcaacaatcatcgcattctacgagatgagcattggcaatccactgattttttccacggccctgctcatcctggccaacctcctggacagcactttgaacaagaagtcgaattga

SEQ ID NO: 9848 - DNA, 1011 bp, synthetic construct
  source 1..1011: mol_type = other DNA
ctgagctttaaggattactttaaatttgataaggacaaaaccacatttattttcgttggcggcaaaggtggagtcggaaaaacttctgtttccagcgccaccgccctgtggctggctgagcaagggaagaagacattgattgtaagcacggacccggcccattcgctggcggactcactcgaagtgccaatcggcagttaccctcgcgaaattaagacgaacctctttgcggtggaaatcgacccggacgtggcaatggctcagaagcaggcccagttggaggcccagaaagccgcaaatcctgacgacggggggctcctggggatggacttcctgtccgaccagctcgatatggcatctgcctcacccggcgccgacgaggcggctgcattcgagatgttcatgggcgtaatgaatagtgacgagtttgacgtagtggtgttcgatacagcaccaacaggacacaccctccgcctgctgtctttccctgaggtcatggattcctgggtcggcaagatgatgatgcttaaagccaaactgggtggagtcacgaacagcctcaagaagattatgccatttatggacgccgtggatgatcctcaaacttccgaagacttaaaacggaccaaggagcagatcgacatggcaaaagaggtgctgagcgatcccgatcggaccaccttcaagatggttgtgatacccgaggagatgagcatctatgagtccgaaagggctctagaagctcttggcaagtacgatataactgtggatagtgtgatcgtcaatcaggtgatgcccgatatctgcgactgcgacttctgtcactcaagacataagctgcagcaaaagcgattggctctgattgaccaaaaattcccaaaccagcacatcgccgaagtgcccctcttcaaggatgaagttaaggggcaggacaaactactgaagctggcccacatattatatgatgacgaggacaacgatgaggtggtccaggacgctatccagctttga

SEQ ID NO: 9849 - DNA, 810 bp, synthetic construct
  source 1..810: mol_type = other DNA
atgatcaaggtgggtgagaacattagcgagatcccaaagctaaactgcgagaagacaaaatgcaacatcgttgacttcattaagtcaaaggtctcggaatcaaaatctaagggtatagtcatcgggttgtccggcggcattgattcaacactcgccgcataccttgcctgcgaggcggtgggcaaggaaaacgtgttcggagtcagcatgccttccactaccaccccaactgaagacaaaatccatgcgattgagatagctcaggaactcggcatcaaatacaaggagatagctattgacagtgttctgaatgagtatttatccgtaacgcaactcgacaattataatctggccatagggaacctgaaggcccgaatcaggatgtccatcatctattactacgccaaccacaacaactacatcgtgtgtggaactgggaacagaagcgagatactgattggctactttaccaagcacggggatggggcctgtgatatcgaaccgattggaaacctgtacaaaaccgatgtgttcaaactgagcgaatttcttaatattcccaaggagatcatcgagaagcccccacgggccggactgtgggataatcagaccgacgaggacgagatcggcatgagttatgacttgctcgatcagattctgtatctgtctacggagaagtacatgaaaaataatgaaatcgctaatcgcctaaacatctccgcagaggaagtggacatgattattaacaagatcatcaggagcaaacacaaaagtaaggtgcccgaaagccctgcaaaaacaatactctga

SEQ ID NO: 9850 - DNA, 2856 bp, synthetic construct
  source 1..2856: mol_type = other DNA
gtgagcgaaaatattgaaaagaaatggcagaagaagtgggccgacgccaaactatttgagtcaaaccccgatgagcgagaaaagctctaccttactgtggcttttccctaccctagcggagcgatgcatataggtcacggacgtacctacaccgtgcccgatgtgtatgcacgtttcaagcgaatggagggctataatgtcctttttcccatggcatggcatgtgactggggcacccgtgatcggcatagcggaccgcattaagagaaaggacaagtggacactggatctgtaccacaacgtgcatggagtgcccaaggaaacgctccccaaactggaggaccctgagtacatcgtaaaatacttcagcacggagtaccatgaggtcatggaggaaatggggtattctattgattggaggcgcgaatttcgaacaattgatccaacatacaggaaattcatcgagtggcaaatcacccagctgcacgaaaaggggctagtcgccaagggcgaacacccagtgaagtactgccccaactgtgacaacccagttggagaccatgatttgcttgaaggcgaaggcgttggggtcaacgaactcacattgctgaaattccctataggtgataagatcctggtaactgctactctgcggccggagaccatcgtgggagcaaccaatatttggctcaacccggatgtggagtatgtcttggtcaatgctaacggtgagcgctgggtcatcacaaaggaggcgcactacaacctcaaaaatcagattaaaaacttagacataatatcggagataaatcctaacgacttgatcggacagatggctaagaatccgtttactggggaagaactgcctgtgttccccgcaagttttgtctccgagtcctacggctcgggcgtggtgttcagcgagcccgccgatgccccagcagattacattgctcttcaggacctgaagaacaacgccgagctgatatctaagtacaacctcgagggcattattgagaacgttcatccaattcccgtctgtacgctgaaaggctatggagagattcccgctgccgacatcatcgagagactgggtatcactgaccagaacgacgagaagttacatgaggccactaatgaattgtacaaggcccagcacagcaagggtaagatcatcgattccatccctgatttcggtgggatgaaggttcggtttgctcgggaagagctaaaagaaaagctcatcaacgacaacatggccacaatcatgtacgactttgctgagaggcccgtagtctgcagatgcggcaacaattgcgtggtgaagattatggacgaccaatggttcatgaaatatggtaatgaggaatggaccgagaagaccctcgaggttcttgatggcgagaccataatccccaaggaaattaagaataatttcgaatattatctcaactggttggatgactgggcctgctcacgcaaggtcggactgggaacccgcctgccttgggacaatcagtggcttatcgaaccgttaaccgatagcacaatctacatgagctattatactatcgctaaatacctaaaagacatgaaccctgacgacttgaacctggctttctttgacaaagttctgttgaacaaggactccggggagattacagtgccggcggagaaagtgaaggagatccaggacgagtttaactactggtatcctctggactggcggctctccgcaaaagacctcgttgggaaccacctgagcttcctgatgttccaccacagtgcaatttatccgaaggacaagtggccaagggggaccgtagtcttcgggatgggtcttctagaggggaataagatgtcttcatccaaaggcaatgttatactccttaaggatgccatcaaggactactccgctgacgtggtaaggctcttcctgatggcctctgctgagccatggcaagatttcgactggcgcgaaaaggaggtgctcggaactaaacgaagactggagtggttccgggaatttgccgcaagagttgaagagatcaaggggtcccccctggatttaagtaacatcgaagaggtggaactgaaaaggaccattgacctctggataatcagtcagctgaatcagcacattaagaatgccacggaggcgcttgaagtcttccagacaagacaagcgctgcaagattcgcttttcctgctgaagaaggatgtggatcattacctgtaccgggtcaagcacataattgatgcccaggatagcgccgtgatctatgtgctgtccacggtgctggaggcctggatcaggctcctcgctccattcacccctcacaccagcgaagaattgtggtcaacctatggcggcgctggctttgccagtgaagccgcctggccagaatacaacgaagagctggttagtgccgagattgaaaaaagcgaggacctggtggaaaacatcattaaagatatcgcccacatcaaacagatggtgggagaggatgtggagaaagtccacatttatctggcacctgactggaaatgggacttatacaagatcgccgacgaggtgggcaaaccagacatcggacagattatgggccgggccattggaagcaaaattcatgatgataaaaaggagattgctatggtagcgaaaaagatcgggaaagagataacgaaaacacgctatatcggcaagatcaacgaggcagagatcctgtctgacgcgctggactacatcaaggaggagtgtggcaacgaggtgatcatccacaccgatgactcatacgacccacagaataaggccaagaatgccatgccctataaacctgcaatctttatggaatga

SEQ ID NO: 9851 - DNA, 732 bp, synthetic construct
  source 1..732: mol_type = other DNA
atgaagatgatcctggacgaacgtggcaagaagtatgtcctgaaatcgggcgaggatttccaatccgacctgggaatcgtaagcgccgacgtactgaacgatgccgacattggggaggaggttaagagtcacttaaaccacaccttcaaaataataaaaccgaacatcaacgacttcattgatataatggatcggagatgctccattctccttaagaaggatattggactggtgttggctcatactgggttggggtcaggcagtcgggtggtcgacgcgggaacaggagcaggcgcgatcgccctaaacttcggcaatgtggtgggaagcgaaggtgacgtcttcacctacgagattagggaggactttgctgaagtggcccggaaaaacattgagaagttcggcatcacgaacgtgcatgtgaaaaataagaatatcaaggacgggatcgacgaggataagatcgatctggtctttctcgacctccccaaacccttcgaggtcttcgaggaagtgatggaatgtctgaatgttggcgggtggctgaccgtgtatgccccatacatcgatcaggcagagatatcttaccgcatcgcaaaaaaactcggcttttacgacattgagatctttgagatcctcgaacgcggtcttgaagttaggcctcagggggtcagaccaaagacacgaatggtgggtcacagcggatatatggtgtttgcccgcaagctgtga

SEQ ID NO: 9852 - DNA, 957 bp, synthetic construct
  source 1..957: mol_type = other DNA
atgaagaacacatggaagctgaagctgagaatgattcttacctcagtggtcatgttcactattgtctatttcctgatcatgctggtcgggctctaccttggtgtgagcagctggaagctgtactttggggcaagcctggtaatcgtctttttgcagtattggttcggaccctccctggtaaaacggagcatgaatgttaggcccctgtcagaggctgaggccccccacattcatcagatggtgcaggagctcgcagacgccgctggaatccctaaaccagagattgggctctcggaaattaacatcccaaacgcatttgcgtatggcagatccagccgaagtggacacatcgccataacccgtcccatcctaggcttacttgaccgggacgaactgaaggccgtcatcggccatgaaatggggcacatcaagcataacgacatgattgtgactgctgctgtgagcgttatcccaatgatctgctattacatcgcgctgtctttcatgttctcgggcgataatgacaatggtggcggaatcataatcggaatcctcggctacgtgttctatctgattggccaactgctggtgctcttcatttcacgaacccgggaatactacgctgacgaagccagtgttgactttggtaaccgcccggccgcactcgtgagtgccctttacaagctcagctacggcgccgctagttgtgataagcagacaattagcgaggtcaacacgaaccgcgccttctttataaacgatgtaaacaatgcaaggcacgatgtgtctgacttccagcaaatcgactttgacggggacggaaaaatatctaatgatgagctgagacgcctagccaactccgatgtgaaagtgtccaggaaaaatgggctcatggagttactgtccacccaccctgattccttgaagcgggtgaaacgcttggcggagttggagtga

SEQ ID NO: 9853 - DNA, 948 bp, synthetic construct
  source 1..948: mol_type = other DNA
atgagcggaccatgggtggagaagtatagaccacagaaactggaagacattgttggccagaagcagattgtggcccgactgcagaaatatgtaggcgaagagagtatgcccaaccttatgttcacagggcctgccggggtggggaaaacaaccacagccctggccttggtcaagtccatccttggagaatactggcgccagaactttctggagctgaatgcatctgacgcaagaggaatcgagactgtccggaataacatcaagaatttctgtcgcttgaagcctgttggtgctccctttagaataatcttcctagacgaagtggacaacatgaccaaagacgcccagcacgccctgcggcgggagatggagatgtacactaagaccgctagttttatactcagctgcaattactccagcaaaatcatcgacccgattcagtcaaggtgcgcaatcttccgttttgctccaatcaagggcgaggagatcaaggagcggctgaagtatatttgcgaaagtgagggcttccaggctgatgatgaagggctggaatccatcgtgtattttgctgagggcgacatgaggaaagctgtaaacgtcctccaagccgccacctccgaaggagagaccgtcacagaggatagcgtgtacgaggtggtgtcgaaagccaagccccaggacattgaaaatatgattaacaaagcactcatgggtgacttcatgggggcgcgcacgcttctgagggaaactatagtcctgcagggcaccagcggtgaggatatggtgacgcagatttaccaagatgtttctaagcgcgtgctcgagggcaagatggatgcgtcaatctacatggacctgattgaatctatcgcggagtgtgatttcagaataagggaaggagcaaacccccgaatccagctcgaggccttgctaacccaattcttatga

SEQ ID NO: 9854 - DNA, 1446 bp, synthetic construct
  source 1..1446: mol_type = other DNA
atgctgtggactgataaataccgaccccaggaactgagcgccgtggtcggtaataaaaaggagatcaagataattacagattgggtgaatgcctggaagagcaacaacccccagatacccctactcctcgtggggccgccgggcattggaaagacaaccctctctcaaattatcgcaaagcaattctccgaacacattgagctcaacgctagcgataaacggagccaagagattatcaaaagtacgatcggggagagctcatcttccagatccctatttggggacgagtacaaactgataatccttgatgaagtcgacggcatccacggcactaacgaccgaggcggagttaaagccatcggagacataatcaaaagttcgaagcacccaatgatcctgatcgccaacgatttttactcaaagaggctgcagagcatcaaacccaagtgccaggtaattaagatgaagaagtcacgctggaatagtatcaccaaacttttaagggagattgctcaggcagagaacgtggacgcaaatcctgcagccctgaaggagatcgccttgaagtcccagggggatgtgagatccgccatcaacaccttgcaggcactgtccagtaaagattcgacactggaggtccaggacgtagaaaacatgaaaaccaaggatacccggtccgacatctttaatgcgattaccggggtgctgaaaagtaagaccccagcccacgttaaggaggcgatgtggatcgaagaagacccaacgctggtcatggagtacatcgctgagaacattccacgcgagtacaagaagaaagacgagatcaagaaagcttatgactacatttctaaggccgacatcttctttggacgcacacagcgcagcagaaattacggctattggaagtatgccagcgactttatgggtattggcgtcagcaactccaagcatgagacatataagaaattcacgaagatacaaactcctaccatcttcaccttaatgagccggaacaggggcaaaagaaatctccgagacgaaattgctgaaaagatgtcggtcaaactgcacgttagccattcaatagctatcagcatgttcccctacctggagatcatgttcaaaaacgacgagctggcctgggagattagcgattacttggaacttgaagataatgagatcaagcgttttaggtctaaaaagattcctaagaaggtgatcaataagatggaaaagcagaaagcgcagatgcgcgtggaagaacgggacaggcgggccgaagaactcaagaaccagatgataaccgctgcagtggaaatcgaggatagctatgagatttccaagcctgatgagactaaagcggaggacacagtgaaaaaagagcccccaaaagagaaaaaggagaagaagaagactgacaagcaggtgtcactcttcagtttctga

SEQ ID NO: 9855 - DNA, 690 bp, synthetic construct
  source 1..690: mol_type = other DNA
atggatctcatgttcgacgtgagcggactcgcaggcgaaaaggaggagtttagtacctccaagaaggacgtgttgaagtttctgaaaataattggagtggacagtcgatttgtctcttacacgcccgacaaaatctacatcaacaacctgaggttctcgaagttctcacggaagagacaggcaaccttcaataagcagtaccccgagattgaagttgtccgcagcagcctgttccagaagatttgctctaagagcagcaaacacctggccctggaaatcaaaccaaattcccttgtcctgatgcccaaggacaatttcatagtggagctcatcatggagccttacacacgcaagtacggcgctaggctagtttatgagggggattatgaccttatggtgaatccactgattctcgatgaccaggtaaacgacatatttgagggtatcttcaatggggaaggcctgaattttaacatcaactctaacgagatctacccattaattaacgtgcctctgaactggatcaattccttcctcgagatggatgggcaaaaatcaatcgagaataagaacaaaaaccggctggcggcctccttcagtgaatttttggaagatgtcgccccgcaatataaggaaaacgtggtaaaagccgctaaatatattgaaaaaaagctagagactgagcagtga

SEQ ID NO: 9856 - DNA, 852 bp, synthetic construct
  source 1..852: mol_type = other DNA
atgaaaatcaaaggcagtaccaacatcgtaggcctgatcggccatcccgttgaacacagtttctcgccccctatgcacaacgccgccttcgacaaactgaatatggattacgcatacgtggcctttgatgtggacagcaacaacctaaagtcagctattgacggtgcgaaatccctgaacatcaaggggtttaatgtgaccatcccacataaaatcggaatcatgcaattcctggacgagattgatgaggtggcttccctcataggggctgtcaataccatcgacttcaagaacctgaagggctacaacacggatggaatcggcgccgtacgggcaatcgaggaagtgaccaacattaaaaataagaatgtcgtcgtggctggggcaggcggtgctagcagagccatttcattttatctggctaggtacggtgccgacaccataactctcctcaatcggaatgttgaccgcgccatgaaccttgccgaggacatcttggactccggactgatcactgagattaagagcgattccatcagcgaaatcaacagctacttgtctgacgcagatattctcgtggacacaacgcctaggggaatgcacccgcacacagacgacgagcccattgcccgagcggaaaacatgcaggaagatctggttgtctttgatgccgtgtataaccccaatgaaacagtgctgataaaggaagcaattaaggctggggcaaaaccagtgtatggcattaagatgctcctttaccagggagccgagagcttcaagatatggactggccgcaaggccccaatcgatgtcatggagaaggcgctgggggagacactaaacttagagtga

SEQ ID NO: 9857 - DNA, 1296 bp, synthetic construct
  source 1..1296: mol_type = other DNA
atggaatttacacgaccgagagggactcgagattttcttttcgaagagatgagggagcggaagcaggcagaaagtaccctgcgcactgtcttcgaaagttacgggtatcaagagatccagaccccactgttcgaagagttgaagctgttcacaaccaaatccggcgaagaaatcgtaaatcagctctacaacttcaaggataaatctgacagagaattgacgctgagacctgaaataacagccccagtggctagattatacttgaacgagctggaaaaaacaagcacgaaacccattaaactctactattacggcagctgctttcgctacgagcgccctcagaagggccggttcaggcagttctggcagttcggctgtgagttaataggggccaagacaccccaaggtgaggccgaggttattgcactctgctgtgatgccatcaaatccctgggaattaccaccgctgatgtcaacctcaaccaccttggcattatacgtggactgttcaagcattttgacatttcagttgaaactcaaagggaaattatggtagttatagataagggagataaggacttgctgatcgaaagcctgagtggcgacgaacccgtgatcaataacgaggagttaaaccagattcttctcaagctgatcgacctggtcggagacaagtcaatcatccccgaggtggaagaactcatctccccgtatgaagagtcgaaagccgcccttgaggagtttaaggaactgatttcactgctagacgcgtttaaggtggagaattataccctcaacctaggggtggcacggggtctggactattacaccggaatcgtgttcgagatttacgtgccagagctgggggcccagaagcagatatgcgggggcggaagctacagcctcgtgaagctttttggcggccaggaggtcgagtccacggggtttgctctcgggttcgaccgccttatgaatgcaattgaggagctggccgataaagaggagttgccctcccacctggacgtgtatgtagcgcctatctctaacgatgtgcggctaaaagctttcgagataacccagatcctgaggaagaacggatttaaggccgacgtcgatctgaacggcaaaaagttcaagaaactcatgaactacgcggataagatcaaggttgaaaaaatgatcatcatcggtgctaatgacctgaaaagcgacaaagtcactatcaagaatatgatcaacggcgagcaggagttggtgggtatcaataatattgtggactatctgaaggaggagtga

SEQ ID NO: 9858 - DNA, 408 bp, synthetic construct
  source 1..408: mol_type = other DNA
atgaaagtcaatttcaggcacgagatcaacggagttaaggtcatcactgccattgcacaggacgccaagaccaatcagatcttgatgctcgcaaatatgaacaaggaggccctcatcaaaaccattaagacaggcaaagctcactactggagtacgtccagaaacaagctgtggctaaagggggaaagctcaggccacatccaagaggtggaagagatcctcgtagactgcgatatggacgccattatactgaaaatcaaccagacaggtgctgcgtgccatgaagggtatttaagctgtttttaccggaagataaacaccaaaaatgaagtggatatcgacgacctgaaggatgaggatctggaggtgattctggagcgccttgtgaaccccgaagacgtgtactga

SEQ ID NO: 9859 - DNA, 1845 bp, synthetic construct
  source 1..1845: mol_type = other DNA
atgaagtgcatcataccagacacaagtgccgttattatcggggcaataaccgagctcatcgagaaggagaacattgactaccctgagatcattgtccctgaagcagttgtgtgtgagctcgaacaccaagccaatgccaaccgatccgagggtcagaagggattaaaggaattgcagaaactacaggaactccagtacgacggcgagctatccattagctttaagggccggcgaccaaccaatcatgacatcaagtacgccaagagcggcgagattgatagcatcataagagatctcgctagaagcgaaatgggaacgcttctgacaaatgacaaagtccaggcggagactgcgaaagcccagggaatccctgtgtattactttgaacaggagtacaaggagactccgctttccatcgagaaattcttcgatgatgagaccatgtccattcatttaaaggagaatgtcgtgccaatggctaaaaagggtaccccgggccacgtggatttcaaaatcctgaacgagaagcgttatacttacaaggaactcaaaaaaattgtggatgaaattctggacaaggccaaaagtgaccctaagacttaccttgagagcgaaaaggaggggtccttcgtggtccaatcaagggaatacaggattagcatagcgtatcctccattttcagaggctctggagattacagccgtccgccctgtggttagtatctccctcaatgaatacaacctatcggaaaagctgctggacaggatcaggaccagcgctgaaggaatcctgatctctggctcacccggtgcaggtaaatcgacattcgtccaggctatcgctaaatattacagcagcaagctgaataaggtggtaaaaacaatggaatcgcccagggatttgcagctgcccgacgagatcacgcaatacagcccattggaggggtcaatggagaacacggccgacgtgctcctgctggtaagaccggattatactatctatgacgagctgcgcaagaatagcgacttcaacatcttcgccgatatgcggttggccggcgttggaatgattggcgtggtgcacgcaactcggcccatagatgccatccagcgcatagcttcacgcgttgaactgggagtcatcccctccattgtggacacaagtatttacattgaggacgggaaagtgacgcacgtgtatgaaacaaagatgaccgtcaaggttcccaccggcatgaaagaggcagatctcgcacggcccgtaattgaggtccgggactttgaaacgggcgagctcaaaaacgaaatctacacctatggggagcagaccatagtcatggacatggacctggtcaatgggtctcaaaactccgaacgccagaagaccgccgtggaaaaaatcgcagagaaagagatcctgagaaagatccggaagatccttccgaaaaaggccaaggtggacgtggaggtgacctctcctgagcgagccaacatctacattccagaagatttcattcccaaaatcattggcaagaacgggaagcgcattgctgagatcgaagagagtatcggcatcagtcttggagtggaagtgatcgaatccaagcccataaacaaacatccaatcgaggtggatatcatccacaccaaaaaacagctgatcctggatctggggcgtgacaagggcaggaagaactttgacgtatttatagacggggagtatctgctcacagcgacaactagcaaaaagggtgaaataaagatcaagagaggcatagagttgtctgatttcatcattgaggccattgagatgggactggagattaccgctattcagaagatgtga

SEQ ID NO: 9860 - DNA, 750 bp, synthetic construct
  source 1..750: mol_type = other DNA
atgaagattggggcctcaacactggctggcatagaatataagctagagaacaccctggaatttattgaagatctggggctgaattacgctgagctggtgcaccagttcccaaacgaaagtattgatgtggaacttctggagaatttcaatctcaaatattcaatccacacaccgttcatggatgtcaacatcgcgagtcttcagaatcagagccggatcaatgcaatcaaccaaatcaaatcctcctttaaactcgcaaacaagattgactgcgagagcgtggtcatccatcctggaacgattcccttcttggccaacaaatactttaggagcaaagtgatagatgttgcgaacaagtcgatgatcgagctcggaggatacggcgaggatctcggcgtccagactaccttcgagaacatgccccagttcgacaatatgatttacagcaatatcgaaaagttgcacgaatttctaacagacaacaacctcagcatgactttagacattggtcatgccaaacacgccggctatagcagcgaggagatgtatttcgattccatcaagcacatacacatccatgacaatttcggggacgatgacacccacctggccctgggtgaggggagcattgacctgaaccatatagtaaacaccctggagaagaataactacgacggcatctacatcatcgaggtgaataactatgactccatcaaaaagagttacgaatacatgaagaagaacttttga

SEQ ID NO: 9861 - DNA, 2322 bp, synthetic construct
  source 1..2322: mol_type = other DNA
atgacttcctacatctcgcaccccctattgaaggagaacgcaattgaaagcagactgtaccagcaggtgcttgctggggacgtgctcaaaaagggcaacactatggtggttgcccctaccgctttaggtaagaccattgtggccgttctggtggcagcagacaggttgcagaaggtgaaaaactctaagatactgattctggccccctccaaacccctcgcaattcaacacgaagctagttttaaggagtttatcactctcccatgcgcttcaataaccggcgctatcaagccagaagagagagttaaacgatgggaagaaagccgcataatttcggcaacacctcaaactgtggagtctgacctccttaacggccgatacgatctgagttccgtgtccctcatggtattcgatgaatgccatcacggggtcggatcgtacagctacgtctacctggcgtctcgatacgtgcaggaaagcaagtttaacctcatcctggctcttaccgcctctcccggctcagataaactcaaaatcaaggaggtttgtgagaacctctacattcagaacatcgtggtgaaaacagaggaggatgccgacgtgaaaccgtacttcaacccagtcgagctggattgggtgagagtaaagatgagttccgaaatcgagaagatcaagggatatgtcgacaaaagcctaaagataagactcaaagctttgaaaaacatgggaatcatcagaaccgtcagcgtgggaaaagtggatatcctgaaagccaggggcaaggtgcaaggcgagattgcccgatccactaatcctgacaaggacctgttccaggccatctctatcctgagcgctgtgattaatatacaacatgctcaggagttaatcgaaacccagggcgtgcaaacatttaacaaatatgtcgccaggctacggaaaaagaagaccaaagccgcgaaatcactgatgtgggacgataattttagccgggccattaaactggcaagggaagctgagaagcatgggtgggagcacccaaagctgggagaaatcacaaagatcatcaagaaggaattgggagaaagtgacgggcagctgaaactgacgacgaatcggttcgatgacaagaacgataagaacgcctctaagatcatggtatttacccagtatcgggacactcttgagatgatccatcagaagcttgaaaaggaaggcatcaagtcagtgaaattcttcggacaggcgtcaaaagatggggaaaaaggtttgacgcagaagcagcagaaagcgatcatcaagagcttcaagatgggggaatatgacgtgctgatatccaccagcgtggccgaggagggcatcgatatccctgccgtggatctggtgatattatatgagcccgtgccctccgaggtacgtatgattcagagacggggccgcacgggcaggaaacgcaccggtcgggtcaaagtcctcatgacaaatggaacaagggatgaagcgtattactggaccagtgtcaataaggagagccggatgaagaaccagttaatagacccggatgtgctggaggagctgaacgcatctgccattgaacgcatggagaaccagcgcaatgtcaaggtcatcgagaagcctaagaaagaaaacaatttccccatagtgtatgcggactcccgggaaggcaactcaaaagtcatcaggcacctgactgagatggagatcgacgtgaaggttaacagcatggctgtcgccgactaccaggtcagtgatgaggtggccattgagagaaagacagccaaggacttcgttgattccatcatcgacaagcgcctctttaagcaggcccgtgagttgagcgaggaatttaagcggcctctgctgatcctggaaggtgacgatctctatgctggtatggtgaatccaaatgcaattcgcggatcactggcatccattgcaattgactttggcatcagcatcattccaacccgaaatgcgcaggacacggctgccatgattaaacgcatcgccgtgcgtgagcaaaatggggagaggacccccatccagattagaacagacaagaaacctgtaagcatgttggagcaacagctgttcattgtcgagtcgctgccgaacattgggcccgttaatgccaagaacctccttgcccacttcggtagtgttggcaaaataataaatgcaagtgagtccgacctacaggaggttgaggggatcgggaagaagacagccgagaacatccgcaaggtaattgacagcaaatacctgtacttcgaaaaggagattaaagaaaagaggcttctctga

SEQ ID NO: 9862 - DNA, 1512 bp, synthetic construct
  source 1..1512: mol_type = other DNA
atgaacaaaaataaaaccttcggggttatcggtgtgtgtggagccaacggcaatttaatcgcaaggatacttaagcagcgcggttataatgttatcgggaccgacctgtctttcaagaaggattgccggtttgcgaaggccctggaaggttacgacatcgaggtcttctacggtaacgcccccgaggctttctttaagaaggctgactatataatccctcccgctagcctgagcaaagactccagtctgttcaagcaaatgggggacaagcctattttcgagctgtacgatgtaatcgaaatgattcagagcgagaagccagtcttcggcataacggggacgaacggtaagacaaccaccaccacactgctgaaaaaaatcgcctacgacaatggcattaagccatgtgaacacgacttggagggcatgcaggggaatgccgagtttatccccattctgcagtctcgtttggacggcgatgtcggaattattgaggtgggcactttcggcgttccgggcaccattggaagaatcgtgaaaaacactggcatgtccggcggtctgattaccaacatcactccagaccatctaaacgatctgggcagcttcatggactacgcaaaggttaaagcggaatttatttccgagctcgggctggggcagctgatcgtaaacggccaagatccaacaattatgggcctcctacgggagctggactttaagggcgaggtcatcacctttggggtggatgagctcccggactcgattggaatgaaagagtgtgtctgcggaaacgagatcgccgtgaaagaaataatttcgggctgcggatactacttctgcaagtgcggcctgacaacgccccaggccgactatatcgcaacaaacatcgatttaaaaaatagaacctttgatttgcatacgcccactgaaaaactcacagtgaagatgggagtggacggactccacaacgtgtacaacctcactggcgtcatcatcgcagctcacaagttcctcgacctcccttatgataagattctgcctaccattgctagtttcaccggtgtcagcggccgcatggaagaggtggccaaagtgaaagggaaggacatcttcgtggactacgcccacaatcctgccggggtcgaaacagtgcttaaggagtttaagaagctatttggagacttcacaacggtcatcaccgtgtcctctgagagcggatatgttggggatatcgatatatttaacagtgcgttgaagttttcaaagttcatcgtgccagcatcagtggcatcacagaaaatcgccattgagaaactcaagtccaagcccgagctgaatgacaggatatttcttaaccacatcgataacttcgagaaaactggaaccctgggggcgagcgaagatgaagtgcgggacgggcttcgaaaagctcttaatttggattgtgaaatggtaatagctatcggagaagccgccactaagttcaagaatgccgtgttcgacctgtga

SEQ ID NO: 9863 - DNA, 1386 bp, synthetic construct
  source 1..1386: mol_type = other DNA
atgaactatctcgttgttggtgccggaaatgctagtaggcccgtggcacgcctgctgaactacctcgggcacgacgtcgtggtcacagacctaaaggacatcagcgaatttaaaatagaatttcagcgaagtctgattgaaatggaaaaagaaggggtccgcttggacatggccaacaaaaacccttcggtggaagggtttgacgctgtttacatgcctcccacgttgcccgagacagccccaatcgctcaaaagatctacgagtctgacctgaagattctcaccaacgaggaatttagcaagatcgtaaacgatttgattgacgtggatatcattggcattactggaactatgggcaagaccaccaccacctttattacaacaagcctgtttaaacaggcaggatacaaggtgtggtcatgttcctcgcttgtaaacaacttagtctcagaagccattgtggacggcatcgtgaagggcaaggtcaatgaatgcgacatcgccatcttcgaactgcctcacgggactattggtcttctcaacaaactgaatatcaaaatcgggctgttgaccaatatcgctgaggaccacctgtcagagttcggtggctcccttgagaagtatcagaagcggaagctgctgctgcaggccatgagtgagatcttcatctccaacaatagctgccatgatatcattgagaaggtccgtgatgacgcaatattttatgctcttgacgaggacgtagacttcaaaggtacggtgggcgataagtcactgactattgcctacggcgataatgaatttacaacaccgttcaacatgatgagctacttcttcgaaaactccgtggcagccgcctccattgcgctcacatatggagtgaacgagaaggatatcatcgatgctctcaaggccttcaaagggctgccagcgcatatggaggacgtgggggagtataatggccggaaagtaatcttggattctgcgtttttatacgatggcatgaaaatcaccctagattacttcaaggatgacagcgtggtcctgttcctggatcacttcgacaccctcagcgtcagggacaaggcagaggtgggcaacctaatcagtgagtataaccttaaggccgttatagcgagcggattcaatgaggttacccaggccgtggagatggacgccgcaaatgagatcctcgacgctataactaatataaacattgagaaagtcgctgtggaaacgatagagaaagccgccgagctgaccttcaaatactccgagcccggagatgtgattctccacatggggccactgatcgcatatgatagactcacgaccgtggacaagattatcaagggcctggaaagaggaagcaaaaagtacgagtga

SEQ ID NO: 9864 - DNA, 1188 bp, synthetic construct
  source 1..1188: mol_type = other DNA
atgttcctaacaaagaaggaggagcaaatgtgcgacggggagttcggagaaactatcagaaaaagcatggacatcctggttgctctcggggatatctatggggcttctaaattggtggatattacctccgcacaggtctcgggtgtgagctacaagaccatcggagacgctggcctggaatatctagaggacttggctcgggacggatcaggaaaagctaccataaacgccagcctgaacccgccaggaactgatctggacaactggaaagagctgggctttcccgaagagtttgccatcaagcagaaccagattgtggatgcctacgccaacctgggaatttacaaaacgtgcacatgcacaccctatctggtggggaatgtgccacgcttcgccgaccatgtgtcctggtccgaaagtagcgctgtggcattcgttaatagtgtgatcggagctaggaccaacagagaaggtggcccggcggcacttgcggcagccattgtcggcaaaaccccattatacggcttccacttggagcagaaccggaaggccaatctgatagtcaatgttgactgcaagatcaatggcgccgatttcggtgcactggggtacattattggtaagttcgttggggggggcgttccctacttcaatcttatgaacagtcccaacaacaacgacctgaaaactctcggggcggcactggcatcgagcggctcagtggctctttatcacatggagaacataacccccgagcataagaatgccgggaaagatgatgtggaagatatcatgtttgtgagccgagatcaaattaatgagacacgccaaaagctctccacgacagacaagaaaccagacctcatctgcttaggatgtcctcacgcctctctcgacgagatcaagcaggtcgctagcatcgtgcagggcaagaccatcaagaataagctctggatctgtacgtccgtcagtgtcaaggccacatccgataggatgggctacaccaagattatcgaacaggccggcggcaatatcgtatgtgacacttgtatggtggtcgcccctattgaagacatgggctttgaggtaataggtgtgaactcagccaaagcggccaactatgtgcctagcatgtgcggactggacgtcgtatacaacgatgtggagaacctgatacagtttaaatga

SEQ ID NO: 9865 - DNA, 1335 bp, synthetic construct
  source 1..1335: mol_type = other DNA
ttgctcaacagggccagtgaagccacagacatgctcaaggagcacatcgagaatgatgacgttatcagaataatttctcataacgatgccgacggaatatcctctgcagccgtcctggcgaacgctctggccgaggaggacgtacaattccatacgacaatcatccctcgcctcaagggggatatcgtaaaccagctgcgacatgagaaatatgatttattcatattcagcgacatgggaagtccattcatcaaggaatttaacacctataaacatgacgtgattgttgcagatcaccaccaggtcaatgacactgaggcggaaagcaatgttgtccacctgaatcctcacctgttcggcatagacggtagtaaggatctgtgtggggcaggctcatcctacctcaccatccgcgggctcgacaagaaacacctggcttatttcgccctgatcggtgcattcggggatatgcaaggacagaatggattcactggagtcaacaaactaattgtagatgacgccattgagagcggcacgctcgaaatccatgaggggcttaagatcgtgtccaagtccagcgaaccaattttcaagtcgcttgcttatacctttagccccccccttcctaagatctccggcgattttgagggggcgcgggagtttctcgaacgtatgaacttgtcttatggaatcaaattcacagacttggaagacgaagagaaagatctgttaaaagaggccttgatgagcatcaacccggacatctttggcgactgctacacagtgcccaaggaagtcccattactgcgcgatctggaggagtactcttacattctggatgcttgcgggaaaaacaaaaaacagggcctgggtctcagtattgcactgggcgagagggatcaggcactggacactgcccttaaactgcaatcccagtacagggaccagattgtgaagggcctggagtggattaagaagcagggtgctgaacagctgaacagtattcagtacctctactcggaagacaaagtcctgaagagcgtgatggggacgatcgcgagcatcggcttgtcagtggagctgctggacgattcaaagcccgtgattggcctttcccggctgcacaaggacatcaagataagcggcagaaccacccggaatatggtggctaagggcgtgaatctcggtaaagccttgcaggactcttcaaacaactttgggggtaccggaggaggacacgacatcgccgccggcgccatggtggcttacgagtttaaggacaagttcctacacctagtggatgagatggtggaataccagcttaccaatgattga

SEQ ID NO: 9866 - DNA, 399 bp, synthetic construct
  source 1..399: mol_type = other DNA
atggcaagaccagaatgggtgacctatagtgacgaggagattgaggagatgattctgaagttcaacaaggaggggaagagcacgtctgagatcgggatagtgctccgggaccagtatggcatcccaagcgtaaaggacgttaccggagaacgcataacacaaattctgaaaaggaatgatcaggccggacagtacccggaggatctcctgaatctgatcaaacgcgctgtcaacatcagagatcacctgagcgaaaaccccaaggacttacattcgaagcggggtttgactattatcgagtcacgaatcaggcgtctagcatcctactacgtgtccgaaggcgcgctgcctgaaggctggcggtacaaccccaaagaggccgccctccttgtcaaatga

SEQ ID NO: 9867 - DNA, 552 bp, synthetic construct
  source 1..552: mol_type = other DNA
atgatcaccttcataactggcaatgaacacaaagtgaaggaggccgagaacatcttcaaagactatgacattaaccttgagcatatcgatctggggtatgaggagccgcagggaactctggaggaggtcgcgataagcggcgcagaatacgcctgtcggaagctcgacaaacctgtgattgtggaggatgcgggcctgttcattaaagctctcaagggattccccggcacatactcccactacgttcaggataccttgggcaatcagggaatcctcaagctgttagccgacaccgatgaccgatatgccgaatttaggtcggtgatcgggtactgcgctcccaattccgagcccaagatcttcctgggaaaggtcagcggtgaaatcgcagtggaagagcgcggcgacttggggttcgcctttgacccactgttctacgtaccaagccttggtaaaacatttggggaactgaccacggaggagaagaaccagttttcacacagaaagaacagtctagaacagtttattaagtggtactctagtcaagaatga

SEQ ID NO: 9868 - DNA, 1590 bp, synthetic construct
  source 1..1590: mol_type = other DNA
ctgatatgcctgggaatcgaaggaactgccgagaagacaggtgtcggcatcgtggatggtgatggcaacatattggcgatgaccggaaatcaattatttccagaggaaggcgggattcacccacgcatggcggccgagcatcacgccgagtggattcctaagctgatccctcaggcgatcgaggagtctggactttcctatgaggatattgacatgatatctttctcccagggccccggcttgggccccgggctgcgcatcgtggccacatcggcccgtagtctcgccctgagcctgaaaaagccaatcattggggtcaatcattgtatcgcccacgtggaggtgggaaagctggacaccggggctgtaaatccggtgagcctgtacgtaagcgggggaaacagtcaagtgattgctcatgagagtggaagatataggatctttggcgaaaccctggacatagccatcggtaactgcctcgaccattttggccgggaaaccgggctggggcaccccggcggcccagtgattgaaaagctgagcaagcaggggtcttacatcgatttgccttatgttgtcaagggaatggacttctcattctcaggactcctctcagccgcgctgagggaggccaaaaagggaacgcccatcgaagacatctgtttttccctgcaggaaacggctttctccatgctggttgaagtaacagaacgggctctgtcccatacgcagaaggatgaggtaatgctgtgcggcggtgttgcagccaactcccggctaagggaaatgcttaacacaatgagcgaggagcacggcgccaaattctacatgcccgagatgaaactctgtggcgacaatggggtcatgatcgcatggctcggtctactgatgtttcgggagtttggctcgatggacttatcccaaactggcattattcagaagttcagaaccgatgaagtggacatcccgtgggtggacaacgtgaagacctacctcaagctgtccgatgacttgatcgctaaaggtgcagagagcaacatcgtgaagagtaactacctgggcgagaaggccgtgctaaaagaccgaatccctaaggggtatcgaatcgccgaaattgatgataagatacgccgcgcaaggacaaaggaggaggctaaacttctaagcgacgccaagtgcgctggtgtcaaaactcccatcttatacgacattaacctcgaagagaaaagcattttgatggaagagatcaagggtaaaatggtcaaggatgtcatggacgaggacctcgcattcaaaataggcgtggaaatcgccaagctgcacgctgctgatattattcacggggacattactagctcaaacatgatgcttcaggatgggaaattggttttcatcgacttcggccttggaaaatactctaatctcgatgaggataaagcagtggacctgctggtgctcaagaaatctcttcagagtatcgactacaatctcgcatcgaagtacttcgattgcgtcctggtgggatatggcgacgaaaatatggttaacaagatcagcgacatagagtcaagagggagatatacccactga

SEQ ID NO: 9869 - DNA, 501 bp, synthetic construct
  source 1..501: mol_type = other DNA
atgggattctacaacgccaatactccagagcagaaacgggtgaaaaaattgacgggggacatcaacatctccgacctgtttaagaacgaatgcaagacccgtgggattgctatttacaacgcgtacaacatccagaagagacttctccacgaggtcgaacaagaacagcttcacggtgtgaaagaggtagacgatcgcctgatggagttactagacgaaaggggaaagaataaggtgacacatcgctatgtcgatttcatcagcaacgaggatagtgcaagcaagggcatcataccccaaaagaccaatgagcagaatcccctgcctcctaaccaaataagaatccccccgcgagcccgggacggcaagcagttcctgaatgatgacgaactcccagaaatcgagatgttgaagaaaatcatgctccagaataagaagattattaaccagaacaaaataattctggagcagctgaggaagctgggcgagaaagatgactga

SEQ ID NO: 9870 - DNA, 1071 bp, synthetic construct
  source 1..1071: mol_type = other DNA
gtgaaaaagatgattgacggcataaagacatacggctccactgagctgatcgaaaagctgcaggaatgcgatgacccagtcttccttcttactataggaacgactgatactagcacaatccccgatattagcggagctggcgccacccccgagctcaccgttttcaccccagcagcagatgctgagttcctggtgctgggcgaagtccactgtacccgaacggccgccgagacagtcgtggacggcgcggccgcccccacccctgccaggcttactaaagcggcactccagctaagcaatatcccattcgtgattattgacgccggctcaaaggtgaaagccgacgtatcgtattactcctttggaaaggagcatgggcgggacatccgcaccggagaggggatcttgaatccactggaaatcatcgaaaacggaaaggatctggggaacgagctatccagacgccacgagatgctcatcatcggggaaagcattcctgccggcacaaccacggccctcggcgttttgaaggccctgggttacgaggctaacgaaaaggttagtggcagtatgcctcacaatccacatgatctcaagtccaaagtggtggatgaggggttgcggaatgctggaataatacccggtgaggccgatgccatccaagtgattggggctgtcggagatccgaccattccggcaattgcaggtctggtgctgggctctgacatccccattatcttagcgggcgggacacagatggcggccacatgcgctgtaataaaatcaatccagcccaactttgacttctccaggatcaacctggctaccacagtatttgtcgccgctgacgagactgcagacttattcggtatcctgaaccagatcgacagcagcattacggtgcacgtcgtggaccctaagttcgaagactcaaaacacgaaggtctcaagaactatctcaccggctttgttaaggagggggcaggggctggcggaatgatgtttaccgccctggtgctgggaagttctgtggaagagctgagagagaagatcgagaaagtctgcaaatga

SEQ ID NO: 9871 - DNA, 834 bp, synthetic construct
  source 1..834: mol_type = other DNA
atggacatactgcaggcgatcattatcggcattgtgcaggggttaactgagtttctgcccgtgagcagcagcgcccacctggtattcgctcaaaaactggtgggagttgaaagttcccttacatttgacgtgctactgcacctcggaaccctcatcgctgtgctgtggttcttccggtgggacataattaaaatgctgaagagctggtggctgtccattggcgacctcttgcagggacgctttaagcaagggttttacgatgatccttataagcgactggcctggtatgtgatcctggcgaccattccagtgggtatcgtgggcgtcttgttcgatgatgccatagaatcattgttcgcaggcgcactatacgtcccggcattctttctgtttgtcacggggaccatcctttacctctctcagaggatgaatagtggaaagattaacatgaataacatgtcgaaggttgaggctctggtcatgggactcggtcaggcctgtgccatcctgcccgggctttcacggtcaggaactacaatcgcagccgggttggtcatgggcctagataaagagttcgctgctaagttcagttttattctctccatcccagccatctttggcgccttcattttcaagctgaaagacataggtagcgccatggacgttaacttcttacccgtgttcatcggcttcatcgtatccatacttgcaggctacctggcgatcaaatggatgctggacctcatcaagaacagaagcctcgacatctttgcctattactgctggctgatggggattattgtgttcatgggcagcatctcccatatcttttga

SEQ ID NO: 9872 - DNA, 924 bp, synthetic construct
  source 1..924: mol_type = other DNA
atggcctgggatgacaccgctagtaagatctgggtggacggagacatggtggattggaaggacgccaagatccatgtgctgagccacgtggtccactatggtacaagtgtgtttgagggcatcagggcatacaaaaacgaaaatggggtcgcggtattccggctcaaggagcatgtccagcgtctgttcgattccgctaagatatacaagatggaaattccatttacacaggaagagattcaagaagccattcttgaggtggttcgcgtcaatgatcttaatggatgctacatccggcccatcgcttttaaaggctatggacagttaggtgtcgatccttcaagctgccctgttaacgtcgtaatcgctgcctgggaatggggctcctacttgggcgaggagggaatggccaacggggtggacatcggagtaagctcttggagaaagccggcacccgacaccttcccagccctggccaaatgtggggccaactatatgaactcccagctggcaaagctcgaggcgattgataatggctacgacgaggccatcatgctggattatgaggggcacgtttccgagggcagtggggagaacatcttcctggtggaagatgaaaagctcttcacgccagcaatgagcagctcaaacctcaaagggattacacgagactccataatgaccgtggcacgggacttgggctacgaggtgattgaagaggttatttcaagggaacgcctgtactcggctaatgaggtcttttttaccggcacggctgccgaggtgactcccatccgcagcatcgaccacagaaccataggtataggcaagaggggacccatctctgaaaaactacagactgccttcttcgagattgtggaagcgaaagtggaggacaaatatggttggctgagctacatctga

SEQ ID NO: 9873 - DNA, 828 bp, synthetic construct
  source 1..828: mol_type = other DNA
atggtggttaagattgctatcatcaagagcgggaatattgggacatcgcccgtaattgacctattgctcgatgaaagggccgaccggccaaatatcgatgtccgcacatttggatctggagcaaaaatgaaccctgagcaggtcgaggacgttgtgccgaaaatagatgccttcgaacccgattttgccatctttatcagcccaaatcccggagcccctgggcccgctaaggcccgagagatgctgagtgaaaaggatattcctgccattatcgtgggggacgccccgggcaaaggcaaaaaggacgaaatggatgaacagggcctgggttacatcatcgtgatgagcgacccaatgattggcgccaaaagggagtggctggacccaactgagatggcgatcttcaactccgacatcctgaaggtgctcgcagagaccggcgcattacgcctggtccagcaaaccattgacacagtaatcgagcaggccgaagcaggggaaatcgagctgcccaagcttatagtcacggcggagaaagctgctgaggcaggtggattcgcaaacccttacgccaaggccaaggccattgcggcatatgagatggctggaagcgtggccaacttggacatgaagggttgctttatgaccaaaggcttcgagaacttcatccccctggtggcggcggctcatgaaatagctgcatgtgctgccaaactcgctcaggaagccagagagatagagaaagccaatgatactgtgctgcggacccctcacatgaaggaaggcaaccttggctccaagacggacctcatctcaaagccagagtga

SEQ ID NO: 9874 - DNA, 579 bp, synthetic construct
  source 1..579: mol_type = other DNA
atgacaaggaacataaacgtgtcacggaagacctccgagactgacattaacattaaaatgaacctcgatggtacgggcaagtacaatatcagcaccggcgtgaacttctttaaccacatgctggaatcgttctcaaagcacagtatgatcgacttggatgtgcaggcccgcggggacattgaaatcgatgaccaccacacaattgaggacgtgggaatactgctcggcgaggcctttaacaaggctattggcgataagaagggaatcaaaagaatggcacacagcatcgttccaatggacgaaagcgtcgcaacaatcgcgatagacattagtggacgaagctactgcaatatggacctaaagttcaagaatgaaaaaatcggggatatgacctccgatgtggtaatccattttttcgagtctttcgccggtagcgccaaactgaatatctatggcactgtcgagggggccaacgaccatcataaggctgaagctgtgtttaaagcgttcgcaaaatctattaaagaggccatcaagatcgagcacaatcagatcccctccaccaagggggtcctttga

SEQ ID NO: 9875 - DNA, 192 bp, synthetic construct
  source 1..192: mol_type = other DNA
atgctacagatcctggtcgacgaggagaagtgcatcggctgcgggaactgtgccgagatctgtcccaagagcgctaaaatttggaaggtaaaggacgtggcacacatactggatctgaggtactgccatgtgtgtacactctgtgccatggaatgcccaacccagtgcattaaaatcgaacggaatggatga

SEQ ID NO: 9876 - DNA, 693 bp, synthetic construct
  source 1..693: mol_type = other DNA
atggcggacgtaaacgctggggtcgaatataagataaatgtggacggtaacttattcctgttggacaacaagaaataccagctcctgcaaagcatcttggatacagggtccctgacaaacgcgtctaaggagatcaaagtgagctataggactgccctgagttacatcgagaaaatggaaagcgcccttaatgtcaagatcgtgaatacgacgaagggcggcaaggggggaggcggaggaacctccctcaccgatgaggggtacagcatcctgaaggagtgcaagaagattaacgcaatcatggaactacacaaggacgtgaatgagattgaggctgatattgttgacattaacgttgagaagggtgtcatgaccatcaaaatgaaccagtttgaaataaatgcccccctgaaccgcaattacgatattggggataaaatcctggccctgatcagctatgacaacatattcctgatgctggagccacagtcctcaagtatcagaaatgtgctaaaaggccagatcatcgaaatgtcacttcagaacgagataattcgggtgaaagtggacgtgggcggagtggtcttgtgttcggacattactgtctctgccgaaaaagagctcaaccttaatatcggcaccgaagtgtacgtaggcttcaaggcaatgtccgttgctacactcaagctctga

SEQ ID NO: 9877 - DNA, 1557 bp, synthetic construct
  source 1..1557: mol_type = other DNA
atggccaacaagctgattagagggagcctcataatcctcataggtaacgtcatcttccgaatcgggggttacatctaccggttcctcatggccatcctgctgggacccacggcctatggtatccttggcattactctgccatttcagggcatctttcagactcttagcgctggggggctccctcccgccatcgccaagtacgtggccgaatacgaagcgatcgacgagaaggacatggcccggcaaacaatctacaccgccctgaagatcatggttttcctaggcctgttcttcggcgtattgatgattttcattgtggcgccatatttggcttatggctatttggggaagcctgaagctctgatccctctgcagatcgtcgggctgatcacgccattcagcgtgatcgtgggcgccttccgcggagcattccaaggggtatataaaatggagtacattgtctatacgcgggctgtagagcagctaggaatgattttatttgccaccgctttcgtccttataggcctgtccacagtgggagcgttatggggcaccgtgctcggatattccctgagtgtggtcgcggcggtgtacatcttcaaataccacatgggaaatctgataccggagcctagtgacgattttgtgtttacacgccgtgatgaattaaaacttgcaactgtcctggtcaagttttccattcctgtcattattaccgctattgctgaaatgctgatctacaatatctgtacaattgtgatggggaagtttcttacattcgatgacattggctttttcgccgcggctgatcctattgcaaggctgcccctgattatctcaatttccatcgctactacaattctgccggcctcgtccgaggcattcaagctcaaagacattggcatgctccagaagtacgtgtcagaggcctataagttctcattgttgtttgtggttccgatgtgcgtgggtctcgccctgtttgcagagcccactctaagagtgctctacttcaaaaaccccgcctatgtggctggagcaatggcactggcaatcctatcgatcggaatgaccttctacagcatattcgccatctccaccagtatcgtgcagggcattggcaatccacgcatccctatgtatattctcgtgggcggggccgttgtcacgggagttctgaactggatcatggtgccaacactcggcatcgctggtggagcacttgctaccagtgtggcctgttttcttatgatggtgccatgcatatactttgtctttagactgaccaaaaccaaagcccccgttgttgcagtcgctaagatattggtcgcctctgccgtgatgggtatagttgcatacttcatccccaagagcaccctgttcctgttccccgggatagtactctgcatggtggtatacttttttgccttgattctggtgaaatttttccagaaggacgacatcgagagcctgaggaaattcagctctaagtttggccccttctctaagctgatcaacaaaatgctcaacttcgtggagaggatcgaatttcgatga

SEQ ID NO: 9878 - DNA, 585 bp, synthetic construct
  source 1..585: mol_type = other DNA
atgaagattttcggcatctgtgccagtccgaggaataacacaaccgagtatgcgctttcaaaagctatgaggcggctgaacgaagagggttttgagacggaaatgttcacgtgccaatccaaagatataaagccctgcatgcattgcgactactgtctggaacataaaaagtgcataatccaggacgacatgggggacgtatacaaagggcttctaactgctgatgggattatcctggccacaccagtgcagaacggcggcatcagtagctatctgagcgccatcatggaccgcaccagagcactcgaggccatcgactacaacatcctccgcggcaagatcggaatgagcatcactgtgggcggcgatcgaacagggggacaggactttgcccacctgaagaatatcacctacttcatgatacacggaattattcccgtcagcggaggtccttttgggtcaaacctgggagcatccttctggtcgaaagattctttagatgatattaaggaggactattacggcatggactccctgaaccggaccttgcacgaatttgagaatttcctcaataagtacatttga

SEQ ID NO: 9879 - DNA, 339 bp, synthetic construct
  source 1..339: mol_type = other DNA
atgattcgccggaagaaaggaaaattcctctcgcaaggtgaagaagatcccatgagtggaacatcaaacttggtggatgtcatgctggtgatcgccgtcggcctgctgatattcctagtgattagctggaacatgcagaacatcgtatttaatgagaacatggacgaacagcagaaggagaaagtgaagaacgcaattaaggaggttagccagatcgaccagggcaatgagcttaatgacaccccagatatcagcaagagctccggcaaggggttcacggaaatggggaaggtgtacagggactccgacaccggcaaactcatcatggtcgaggggtga

SEQ ID NO: 9880 - DNA, 642 bp, synthetic construct
  source 1..642: mol_type = other DNA
atggtggctatccctgggagtgagttcctgaccgcggctctcaatgtggttagccagagtctgcagatccccgtaattattttccttttgattttcgcagtgtttgccgtttttgcctttggaggccttatctccgactaccggaccaggataaaactgaatagggattacaaagaaaagctgatattttccctcgtcaactctaagacagtcgacgaactgaaacacgctgtggatggttcagagatctataattctcaaaaggaagtgctactcaagatcgccgatgcccatagcctcagttgcgaatctcgggagtcatgggccctgaacctgattgaggaagaggaggtcgtcatggccaagagccttgagaagatcgacatcgttactcgaattggaccaactctaggactgatggggacgctgatcccgatgggccccggtctcgcagcactgggcaacggggatgtgtccacattggccgctgccatcattgtggccttcgacaccaccgtcgtgggcatcgggtccggcgcggtggcttacgtgataagcaaaatcagacgccgctggtatgaggaatacagctcgaacctgcagttattcgtaaacgcagtgctcgagaatttgaacgactga

SEQ ID NO: 9881 - DNA, 684 bp, synthetic construct
  source 1..684: mol_type = other DNA
atgagtttcagtctgttgtggagcgtgggcttcgccgtttccatagtggtcttcgcgataagtatcggtttggtgattaatagcaaaattaattcgaacaagaacctggtcaagctggtttttgtcctcttcatatccaccctgatccttatctattcgatttgcattttcaagattcagttgaacagcatcatagggtcctacaattatgtactgctgtttctgattgcattcctactgatgtttatcggatacattatcatcaaagagaatgggtgcggccgaaccttcatcaacgtgcttctcctcagctacctcagctttatcctcgtgatgttaatctgcataggctccaaagaatccatttttggactggatgaccttcagatcagtctcctggctacactactgttcaattccctcatccttgtggtattcttcgcctgtcggaaactcaagttgattgacaggagctaccgcagcttcggcagcctatacctcatactgggaatttattgtctgatgatttcattactgcttcccaacatcatcagcctgaacatgggggatatgaagccaatcaacatcgtctcaatcgactcaatcgcctttatttttattctgctgatcgtgatcatggtgctgggtctgctgtactataagagaaacacgttgctcaagtga

SEQ ID NO: 9882 - DNA, 516 bp, synthetic construct
  source 1..516: mol_type = other DNA
atggagtgcaagaaattagccctgctgatttccgtgatcttcatcatgtcatttgcagcaagcggagtcttcgcgcaccccggccacggttctgagtacgtggaagaggtgacgtcagacgatgtgggcagcagcagcaattccggaagctcttccgggagcagcggctcttcaagtaactctgggggctccaccgtgccagcttcatcgtctagtagcagctctagttcttcacggagttccagctactccagtagcgacccgtattccagcagctcgagttcgagtggagcccacgattcaaaccatgacagctaccagggctcctcatccaactcggtcgtaaaagacaactcctcccttaaggacgccaacaagactaacgaaaatctgaccaatgattccggtgagatcgataatgacgaactcttcacagtcaacaatattctcctgctgatcatcgtgttgttttgtgggtttttcataagtgttattctatttaagctcttctcttga

SEQ ID NO: 9883 - DNA, 2931 bp, synthetic construct
  source 1..2931: mol_type = other DNA
atggggggtaagaatattaacaaacacctaattagcctactcttcttttgcatcttggttctcctaatggccggcggagtgtatgccgaggatatcggcaactccgatgtgtttgaaaatccaatcagcacggacatccagcaagacgacttatccgaggacgacttggatatctctaacctgaacgttaaggtgaattatcagtatgcggatgacaacggcaagatcaaccccacgattaaagtgaatgacaaacacatcatctccaaagaatttaattccagctatcagaattacaatgtgatcattaactctacaaacatcgccgataaactcaacatctcgatcagcgcaccgggatatctcacccaatacaagatagtcaccccaaacatggggaaatctatcttggcgaacgtcacttttaacatggagtccagcgagtcctacaagctcggtagagacgtcactgcggaggccgacaagctgctggactttaaaaatgctgacgatgtgctggctatcacaactgctggtgtggcaaagtataacggcaagaccagtgaagacgcaatggaagccatggttaattacggaaaaatcagctatagcaacatactcatgcttcgtcaaagcgcgatcgaccccatcgacttcgccttcattgtgaagaagggaaatgagttaaaggcgatcatcttccagaacgcatccactaaatattcatatttgggaacgattagcgagaacatgacaaaggcccaatggaacaagtactacaagtcactggttggtgaaaattcctgggccttcgccagcctcgcaaacgggtgggctgctggcgtttctcgcgaaatcctgcaggaggccgcctttcatggccatatttgtgagggcaccctgggcggctacagtattattcaggctttgctgaagtactatccgcctgagcaggaaaataatcccggcggaatcgggtcccctgccgacatcactgcgtacaaggttctcggagtgcctggcggatcggacgatgacgcagctctgttctttctcgacgacacaattgggaagactgggtatgccggcatgaacaccacgaataccggggccacggagaatatgattgggttcatcaagtggaatagtaagcaaaagactggcgacctgatcatcatgtccttcaattccacgaagcttaaaaaacttttcaaaaaagagaccaaaataaacgccgatgctggcagtctggaagagctgaaatactgcagctggtggatcaacaagattaacaacaaccccgagaagctggtggactttctgtatgaatttacagggctcaaccaagaacagtataattacctgatgggaaccacggaaaacataacctacgacggggagcccgcagagtacggtctggatggccacggcctggacctgaactacatcttatctctgaatctccccaccgcgaagcgcacaatcaatagcgtggcgcacgctaagttaacagatgctgagcttaagcagatcgggattgatgccgccaataaggccaagaagatattcaacgaagagcttggggtggagatcgacagggacgacattgatttcctagccctgaccgacgccggatacgccttcctgaacggccaggataccgtcgtggtgcgcgatggtctccatgaagtcctgggaggaacactgtatagtcagaacctcttaagccttcaccaggccgtatggaagccgttgtggtttgccttcgccatccggtatccggattctgatctggtggacatgatttacctgagatacaatccagacaccaaagatttctttgtgggaacgctggacgggaatcgagtggtggatatcgggttcgagacactgaataactccgataaactcaaggctatcgcaaagtctttcgtgcccgatggaaactggttcaatatccagagtatagttaacgcctggaacgagcaccctctgtttgaccagatggccactttcttgtaccatgctcacgtctgtcccggcgtgcagccaggtttctttatcaccgactacattcaggaaaagtacccacttggcgaaaacgagtcttacacctacattgcatcgagtatttactgcaaggacgacagtctcacctatctattggatctgagccccggcctcggtactttttatgtccagaaactgccaaagaacgaaactgaaaatggaatatcccagggtgttctggtcgtatgggacaagaaccttaagataggtaaggcagtaattgtgaacttcgatgattgggggacaatcgacacaagtatgtatgtgaccagtgaggcaaagcgggcctcccagatcaaagcttatattgacatatacgggaataggaacaatccaaacgtgaagtctaaaccaattgtctcaaccgtaaatgagaagtggatcaccgaggaacagttcaacatgcttaaacaaggggccggcgatgatttcaatgtcctctcatacttgaagagccttgatgatatcactaaagaggatctgctcaagagcataaatcagaactccaacagcaactcaaactcaaactcgaagcctaacattaaccccaacagtaattcaaactccaatagcaacagctcctcaaatgctatagcatcgcacacaaactccaatccttcaagcagcggaagcgtgggaacctccggcgccgtcgtgtcgagtgcatacgtgggcgagtttacaaaagatgcggaaagcgaggactcacagaacgggcctgacgacgcaaaatcatacgaggtctctaaatcccccgccgccaagagcgctgatagcaatagtctgatttacgctctgattggtgtcttggctatcggcattctgctgggcgtaggctacatgaaacgggacaaaaaatga

SEQ ID NO: 9884 - DNA, 624 bp, synthetic construct
  source 1..624: mol_type = other DNA
atgcatctacctgacggaatcattagtttcgaacaggcaattatctattggacaataacactcatcatcgtgtccctattcttttacaaattctctaacgatgagaataaagaaaagcggattatttcaattgcgctgtttagtgtttttacgatcggcatcacgagcctgtccatcccatcaccgcttggagtgcctatccacttcttcataataccacttatagccatgctgctgggtcccttctccagcaccattgtaagctttgtcactttgatcatgcaagcgctcactctgaacatgggggggattaccagcctgggtgctaatttcattgtgattggcttcatactgagcgtcgccacctacgggttctataagctcttcctgaatctcaacaagaaatttgccatttttgggtcgacagtgatcggaattatcatcgccacctttggccagatcggcatcttattgatctccggcgcaatgaaccttgacgtgttgctgagtactctgctccccttttacgtcttcatcagcttcatcgagggatttgctaacgtgattattatcaccgccatcgagaagataaagcccgagatcatcgaaattaacaaaatctga

SEQ ID NO: 9885 - DNA, 483 bp, synthetic construct
  source 1..483: mol_type = other DNA
atgaagtacctcaagatctccattctgttgctgattctgcttctcggaatctcgacggtgagcagccacggcgtggatgtgacagccgacaccatggttgtggccaacgacagcaatggcaaaatggtcaaaagtattgccgaatcaaataatatcaacattagcgtgtacaaattcacctcagaagatgaggttacacatatcctagaacactccatcaacaacaccaacaagcgcatcctgtttactgcatatcaggagacggctaatgatttcctgaaaaagcacccggacatgtccaataggataattgtgatcgacaatgtcaacgacaacaccactttggagggactgcagaacatcatgaatgtgcccgtagagaacgtcaatagtgagaacaacttcggcctcccacttacaatcgggatcataatagggttactgatcggtattggctgcggggcgtacattatgaagcggtga

SEQ ID NO: 9886 - DNA, 840 bp, synthetic construct
  source 1..840: mol_type = other DNA
atgaagatagggaaaggtatcgtgaagaaatactcgcggaagtataaccgaacactcaaaaatggcgaacagaagaagtatactaccgaacaaatacaaatcaccatcccaaaaaacgaagacatttactacaaccaggaggaggtactgattatccccaatagtgaaatcgaaaacttcaagagtagagaagaggagaatgagtttctgaagatcgcaaattatttctatgtggaggaagtgaaacagttgaatgagcagatggatgagaacctgaacagcacgagcgagtacgaaaaggaaatcgaggagctgaaagcgaagattacttctttaaaggatatcgaagacaaatataacagcatcaagaaggacaatatcgaccagctcaaacaggagaacgagaatatccgcgataagcactccaaattgattatcgagaacgaaaacctgaaaaacaagttcgtcaacattaaaaccgagaatgagaacctaaaaagcaaatactcaagcattaaggaagagaataggaacctcaaaatcaagtgctccaacctgaaggacgagcattccactattaaagatagctacaatcaagtttcaacaaagtacgatcagctcaagcaggaaaacctcaataccaagacaggctatgccgagatctacgaaatcaacgaggaactagaaaaagactacgacacgcttcggcttgagtacaatgacctggtcgataagattaacagtctggaggaggagctgtacaagataaaggctatgaaggaccacgacacctatatagccaataaggtgaaagagtttattctgaagtccggaaactga

SEQ ID NO: 9887 - DNA, 282 bp, synthetic construct
  source 1..282: mol_type = other DNA
atgggcttctgcaatagctgcgggcggccaatcgtcaaagaggattacggcactaacaaggacgggagcctaaaccccgacttttgtaaagactgctatcagaacggcgagtacacggaacctgatataactctcgcagaaatgattacccgcaagacaaaggaaatgatggagaaaaaccccaggctgcccgagacacaggcgaccggaatcaccgccgtgttcatcccgggactgaagagatggaatccagagttccaagatgactacaagaccctgtga

SEQ ID NO: 9888 - DNA, 1251 bp, synthetic construct
  source 1..1251: mol_type = other DNA
atggaccccatgtataagataggagaggccctgatcggagacggccctgaattggcacacatcgacttattgattggtgataaattcggccctatcgggcaggccttcgccaatggtctatcaaacctcagcgtcggacacacgcctctgacaagcgtgattagacccaacttaatgaccaaaccggctactcttatcatccctaaagtaacagttggggatctggatgacgcgggcaagatctttggcccggcccagacagcggtggcacgggccgtcgcggacgccgtagaggacggatatattcccaaggagatagtcgaggatatagtcattaatgtgagtgtgttcattgaccccagcgctaaagattaccgcaaaatctatcaatacaactacggagccaccaagctcgccatcaggcgcgcaatggaggactacccctccattgagaaagttctggcagaaaaagaccggggcactcacccaataatgggattcaaggtcaaaaagctgtggagcccaccctacctgcaagtggctctcgacctggataatgaggatgccatggagaggataatcaacgatttgccggataatgaccgaatattgctcgaggctggcactccactcgttaagaagtttggggtgggcatcattggcaaaatccgcgccctgcggcccgatgcattcatcattgccgacctcaagaccctggacgtgggccgggtggaagtgaaaatggcggcagatgagaccgccgacgccgtcgctatctcagggctcggcacggtggagtccatcgctaaggctattcacgagacccagaagcagggtatctattccatccttgacatgatgaacgtcgccggatttgaggaaaagcttgccaagcttccaaaggacctgaagccagatattgttctgctgcacaggaatgtggacatggaaacgtaccgtgccgagcatggggaggacacaagtgacatgaccgagtgggggaacatcaaggacattaagagcatgctgggtgataaagggctggtggcagtggcaggcgggattcgacctaacaatgccgaagaagctatcgagaagggcgcgaacatcattatcgctggtaggtacatcattggatcgaaggatgtacgcagagccgcacaggacttcctggaacattttgaaccagatcccgacaacatgagactagctatggatgaagacgaaaacatcgaggtgaaagatgactga

SEQ ID NO: 9889 - DNA, 1827 bp, synthetic construct
  source 1..1827: mol_type = other DNA
atgcggatcttactcatccactctgattacctgaattataatgtgaagaacaagacacctgtcgcagaggatattgaggaggctaagaaggaagggtccttcgatgactcgctggtggtctttacagctgtggagaaagatgacgaaaataaccccgaggggatcgtgaagaacctggtgagtgaggtgaaaaagactaatgaccaagtgaaagccgagaatatcgtcttgtatccgtacgctcacctctcttcctccctgagctctccaaaagttgctatacagatcctgaaggacgtggaggaagcgctgctggctgaagatttcaatgtcaagcgcgtgccgttcggatggtataaggcctttgagataagctgcaagggtcatccactcagtgaactctcccgcacgatcaccgccgatgacgccgagaaggcgaaagtggagagaaaacctagcaaatggcagattctcgaaggtaacaagatcacacagattgaagactttgagtttgataacaagaccttcaagcaactagtggactacgagttgggacagggcgcctccgacgagggcgaacctcctcatgtgaagcttatgagggagaaggaaatttgtgactatgagccagccagcgatgttgggaacctgagatggtatcctaaggggcgactgatcagggatctgctcgcggattacgtgtacaaccttacagtagaccatggagcaatgcctattgagacccccattttctacgacctcgataatgaggccatctatcagcatgcttacaagtttggcgagagacagtatcggacagacacgaagaagaatttaatgcttcgctttgcctgttgcttcggagcatttagggtcatgtcagactcatacttgacgtggaaaaacttgcccgccaaagtttacgaactgtctacatacagtttccgtttcgagaaaaaaggcgaggtggtgggtctcaagagactgcgcgccttcaccatgcctgacttccacagcttctgtgccgacgtgccggcatcgctggaagaattttcaaatcagactgagatgtgcatgcaaactggaaacgatttaaatctagacttcgaggtcattttccgggccacccaggacttcttcgatgagcacgaggaatggatgtatgaggtcgctgaaaaattcggcaagcctgtccttctggagattttgccagaacgacaccactattgggtctgcaagatagacctggcaaacatcgacgcgctgggtcggcccatagagaacccaaccgtgcagattgacgtggagagtgggaaacgctttgacatctcctacctcggcgaggacggggaacagcataacccgaccatactccactgctctcccaccggctccatcgaacgcgtgctgtgcgccatgcttgagaagaccgccattgagctgaacgaaaagagcccaatgctgccaacctggctgagtcccatccaggcaagaatccttacggtgggagaaagccacaaggaatttgcagaggaactgtacagcaaaattaatgcttcaaacattcgtgtagatatcgacgatagggatgaatccgtaggcaaaaaaatccgaaatgccagcaaagagtggataccctacatttttgtcgttggcgataaggaggttgaaagcggcaagttccaagtcactgtacgggagactggggaaaaggttgacatgacagtggatgagctaatcaacgagatcaacgagaagtgtgaaggaaaaccctttcggaggttgcccctgcccaaagacatctcaagaaggatcaacttccagtga

SEQ ID NO: 9890 - DNA, 1356 bp, synthetic construct
  source 1..1356: mol_type = other DNA
atgagaatcattctggccggaaccggtagcgccgtgggcaaaacaaccatcgctaccggaatcatgaaggcgctgagtgagaagtacaatgtgcagccgttcaaggtgggccccgactatatcgatccgtcttaccacacacttgcgacggaaaatattagccgcaacctggactcgttttttatgaaggaggggcaagttagggatagctatctcaagggaatggagggaaaggacatcgccattattgagggggtcagaggcctttttgagggcatcgactccgtcaacgacatcggcagtacggcttcaatcgcgaaatctctaaaagcaccagtaatcctcatcattaattctagaagcttggtgaagagtgctgcagcgatagtgttaggattcaagtcactagatcccgagatcaatattgccggcgttattcttaacaaggttaagaataaagcccactatctgaaaactaagaaatcaattgaggagatcacaaacaccgaggtcatcgggggaataatccgtgatgacaacatctccatcgagcagcgacatctgggcctcgtgcccgcccgggaacgcgaaagctcccttaaatttatcgaactgtggtccgaagtgatcaaaaactccattgacttggatcggctcatcgagatagcaaagactgctcccaggattacctccaacattactcctatctggaataaactgaataagcagcaggtaaaaataggtgtggcttatgatgaagtcttcaatttctactataaggagaacattgaatccctggaggcaaacaacgctaagataaagtacttcagcccactgaaggatgaggagctgcctgacgtggacggcatctacatcggcggcggttacccagagctcttttccaaagaactgaatgcaaaccagaatatgttgagtcaaatcaagaacttccacatggaagacaggcccatctttgccgaatgcggggggctcatgtatctgatgaacagcatacacgaggatgctgtggtcaatatatacccttacaagtcaattctcacagatcgcgtccaggccttaaaatacaccatcgccgaggtgaaagaggacaacattattagtaagaaaggtgaaaagttcaacgggcacgagtttcattacagcaaagtgctggtcaacgacaataatatcaagaacaagttggccttcgagatactgcgggggaagggaagctacaacaaccaggacggcttcatggaacgaaatacgctggcaagctatgtgcacacccatgtagccgccatgccaaacttcgggggcaacttctgtatctcgagcctcgaaattggaggttga

SEQ ID NO: 9891 - DNA, 1062 bp, synthetic construct
  source 1..1062: mol_type = other DNA
atgaacatccggaagattgattttttcaatccacttattgtggtagtggctatcgtcgtgttccttctgatggggtatgccggctcgtttgactaccgctttgaagaccctctcaacatgaacgtctttctgaccattattttcgcatgtattgtgttcgcaactggctttttggtcatggagaacaaaatcatcgttgataagactaaggaaatcaattttatttctgagaggctcctgatcattctcgtgctcattgccttgatactgcagactctaaatataatcttaatcgggggtattcctctgtttaacagtgtgctgaagagcaactcaacgacaaatatctggcgaatagcttacccgctctttttgataatgatcaacctgctgctcgccaaatattataacaagaaatatttaatcctggtggccctgggcgctctcatattcgggctgaacggctataggacatccgtgttgggcattctcgggagctctttcatcaccctatactatttgaatcgcatcagcaagaaaataggtatcctcttcatagcaatcatcgcgatcggattcatggccatcggatacattgcctcccagtccatcgcgaatcagcattggaccttgaatccagggcaactggtactgtacagagccgcatttaccctagaggtgtttgaaaaaataatcccccttgccggttcaacaaatgggcacattttaagcatgattttcagtagcggaagcccccggacctttattggcgaatacgtcctgcactacaacgtttgccttactagtacactgttcggcccagttaccctcgacttcggactgattggcctggctattcagatgcttttcatgggcgtcttcattggaataatctacaagctgaaagagggcatcggagtgggagtgtactccattatcctgacgcacacgctgatctggatcgagaccggtcccacagacatcatgatctggttcctttatttcctggggctgatcctgatcatcatcaatcataactacattaagctcaacaagaactga

SEQ ID NO: 9892 - DNA, 903 bp, synthetic construct
  source 1..903: mol_type = other DNA
ctggagaagccccagctcatcaactttatagctaaagtaatggaggacagcggttttaaggtgtacaagaattttaagacttcccagagagtgatcgacatatacgccatcctgcctaccacaatcggcgatttcggggtggtggtcgcctgcaaaaactacgataaagacttcaaaattggggtcgacgtactgcgggaaatggaggaagtgcagcagagtataaaagcatctaaggtcaccattgtgtcgtcatcttacttttcagaccaagccaagaactatgcgctccgcaagaacattaaactggtggatagggacaacctgcttgagctcgccaagaagtatcaggaccgcaccagccaaacgacattggacaatacgccctacgatggcggcgcctcccagtacatcgaagatgaatatccagagtacacttacgacgcgtcggatatggagtacctcatgagacggcgagagcagaatccggctgtctataaaaataccctgtacaggcagatcgacgaagaccgtcacacaggattctcaagcatcctgaataggggaagcagccgcaacagtagcttatccggggtaaccaacctgtataactaccagtcccggaaaagcactttcggacaagatagcctgctcttcaacttggtgaagaatccaatcgtgcttattatcctcgttgtcgcagtttcctatatcatttcttacattgcaggtaatctattaaaggtcgatgccggcatcagtggactgattgagatgatcgtggctctgttcctttcatatgggctgtccctctataccgatagaaaccgagactttatcgtgaagggcacattcatattcttcatcagtttgattattctaatcatactgatctttgtttga

SEQ ID NO: 9893 - DNA, 777 bp, synthetic construct
  source 1..777: mol_type = other DNA
atgaacgcactcatttcgaacgatgacggtatcaccgctagcggaatcctggcgtccaagaaggccatggaaaatctgtgcgacacatacgtggttgcccctgagactcagcagagtggaataggccacgcccttacactcttcgagccattgcgggtgaatgaatatacgctgagagacgggagcatggggtatggggtgaacggcacccccaccgacgcggtcacaatcggcctgttcgaaatactcgataaaaaaccagacatcatgatttcaggcataaacacggggttcaatattggaaaagcagagcttaccacgtccgggacactgggagctgccatggaagctgccagtttcggcatcccaacaatcgccatctctcaagaggtaactcaggacgacgttaagtttgagaatggtaaggtggaagtggattttgactttgcagtgaaaatgcttaacaagctggccaagatcgtactgaagaaaggactgcctgagggcattgatttgctaaacgtgaacatcccggtcaacccgtcagatgatgaatttgaggtggtcgaactgggcaataggatgtactcccccgtggtcgagcagcgcttagacccccgaggaaagccatactactggattgacggcgagccctatgagttcaacgagcctggcagcgacgggtacgaactaaagattaaacagaaaactaccattacccccctcaagatcgatctgaccggtgatatgagcttgatcaaggagtggctcaagtga

SEQ ID NO: 9894 - DNA, 144 bp, synthetic construct
  source 1..144: mol_type = other DNA
atggcaatcaatcagctcgagagcaacctggaagccatcacccgcacaattgcgcagctgaagagagacggctgcacggacgagaaaatcctaaacgaactccgggaggagagggacaaaatacttaaggatctgaacttgtga

SEQ ID NO: 9895 - DNA, 204 bp, synthetic construct
  source 1..204: mol_type = other DNA
atgaaccaagacaaagataatgtgaataaaatgttcaagcagttcaagaataagtatgtaacagtggacctacggggaaactaccagagcgaaggcaagataatcgccattgacaactacctcaacatcatcctggagaacgagaacgggctggaaaccgtcaaaggcggtaatatcatatttattagcgtgaaggaggagtga

SEQ ID NO: 9896 - DNA, 1008 bp, synthetic construct
  source 1..1008: mol_type = other DNA
atggtgttcatcggtatggaccacggtaccaccggaatctccttctgcataatgagcgatgatggcgaggtcctcgacgtgtttaaactgggccgggaggaaagtaaaaaggggctagtgtcggccactgaggagataacaaaacgagtggacctggactcagtcaagctaatggctatcacctatgccatgggggatggcataaaccagatcctgcccacagacaaggtagaagaccgcgggattttgagcatcgatggggctggaaaagtcaccggcggtggaacgtccgtgttctccgagctcgagtcattggacattgacagcatcatgattccgggccttcataaagactctaactctctgaacgaactctttcgggcagcgtactcccaccaggccagtcccgaaaaggtgagtatctgctacaacggcctgaaggaaacaggctggtctaacttcattgtagcagatatttcctcaaatagcgtcgatatactgattgaaaacgggaaaattaagggggcgatggacgcctgtctgggcgcgatgggcgttgtgcacggacctatcgacctgaagatgattagggacattgacgagggaaagagctcggctaacgactgtttttcacacgctggagccatcaagattgcaggaattagcgggaaggtcgctaacgtgaaagatgtccttctcgaaaagtatagaaacggggatgaaaaggccaagttggccatcgatacccttatcatgactgtggccatggaaatcgccgggctggatgtgatatgcgagaatgagatcgagggaatcgtactgacgggcagcattggcagtgcaatcgagccatttaatttcgaggacgagatcaataaatacttcaagaataagtaccatttaaaagtgattagcaaagagtctggcgccatcggcgctgcccaaatagcaatggatgtttataacggtaaggaggaaatcctcggtatcgaggttaatatctcctga

SEQ ID NO: 9897 - DNA, 993 bp, synthetic construct
  source 1..993: mol_type = other DNA
atgaaaatgtattacgacgccgatgtgaatacagacgcccttaagggaaagaccatagctgtgatcggttacggcagccagggccgagcacaaagccgtaatatggcggattcgggagcgaacgtcattgttggggtacggaagaatggctcatcttggaacttggttcaggaagatggcatgacagtgaaaacgatcgaggatgcagccaaagaggccgatatcatccacatcctgctccccgacgaaattcaggagaaggtgtacaaggagcaaatagctccctacgtggagagcgggaacaccatcagcttctcccatggctataacattcacttcggtctgattgaccccgccgccgacgtcaacattgtaatgttcgcacctaaggggccaggctccatggtcaggcgcacttacgaggaaggatttggcataccagggctggtggcagtggagagagacgctaccggcgatgccctgcagctcgcactcgggatggccaaagcatgcggtctgactaaggcgggggtgctggagaccaccttcaaggaagagacggaaaccgacctgtttggcgagcagacagtgctctgtggaggcataacagaattgatcaatgcaggatttacaacattagtggaggctggttatcagccggagatcgcttacttcgaaacttgccacgaagtcaagctcattgtggatctgatctacgaaaaaggcttcgccggcatgtggaacgacgtcagtaacaccgccgagtatggggggctaacccgcggaaaaaccatcatcacggacgaagccaaggaggggatgaaagtcgccctgaaacagatccaggacggaactttcaagaagcagtttgccgatgagaatgccactgatggagctaaccttaaggagatgagggcggctgagggccagaaggagatcgaaattgttggtgaacggctgagaaaggcttgcggactacaaaaagacgactga

SEQ ID NO: 9898 - DNA, 528 bp, synthetic construct
  source 1..528: mol_type = other DNA
atgagtatactggagaatgtcctcgaagataataagaaattcgttgagaacttcgagggcgaggaaatgtcacaccatgcccagaagaacctcgctatcctcacgtgcatggactgtagattaattaactttttcgaaccggctctgggtcttaagcgcggggatgcaaaaatagtccgaaacgcaggaaattccatcgtgggcgaggatgccatcaggagcattggagcggcgctgtacaacctcggagctgaagaggtgctggtagtggggcacaccgagtgcggcatggccggcgccgacgtggaagccctaaaggaaaagatgctggcacggggcatcaaagaggaggacatcgccaagtatgacttgagcaaatggatcggcggatttgacgacgaggaggagaatattaagaacgtggtggaaaagattaaaaaccacccactgatccctgacgtgcccgtccatgggctgatcttggatgtcgttacaggtgaactgaaggtgcttgtagatgggtactga

SEQ ID NO: 9899 - DNA, 486 bp, synthetic construct
  source 1..486: mol_type = other DNA
atgaacaaggaataccacgttatctcaacattggtcgaggacaggcccggggtgctgcagaaaattgcagggttattcaaccgcagaggcttcaacatcgacagtattactgtgggtgccagcgaggtggaaggactgtcgagaatggtcatcagcgtcaacgccgacaagcagggccttgaacaggtaaccaagcagctcaataagctggtggatgttatcaagatcaaagatattacacagaatgccgtcaatcgagagctgtgcctgatcaaggtgcatattccaaacgaaaaagcaagggctgagattatgcaatataccaacatttttcgggccaaaatagtggatgtgagcgaggagaacctcatcattgagctcactggagacatcggcaagatcaatgcgttcatatccctgataaaaggttacggaatcaagacgatctcccgcaccggcctaaccgctatggcccggggggtatga

SEQ ID NO: 9900 - DNA, 1698 bp, synthetic construct
  source 1..1698: mol_type = other DNA
atgcgcggcggcgaagcgataatccagtccctaaagaacatgggggttaagacaatatttggctacccggggggacagaccataccgttttatgacatgttgtacgactcagacatggaacatatacttgtccgccacgagcaatgcgcagcccacgccgctgacggctacgctcgcgcttctggccgtgttggcgtgtgtctggcgacttctgggccaggggcgaccaaccttgtgacgggtattgccacagcctacatggactcttctccaattgtggctattacaggacaagttcctactcacctgatcggaaacgatgcattccaggaggccgatattatcggcattacaatgcccatcacgaaacatagctttcagcccaagaatccaaattatatcccctcaatgatcaagtccggcttcgaaattgccgcaagcggcaggcctggacctgtggtaattgatgtgcccaaggaggtgcaggaaggtgagctcagcgacttcgatgattcgttaatcgatacacccgggtacaatcccaccactaaagggaacctgagacagataaggaaggcctgcaacttgattaaggatgccaaaaagccaatgatcctggctggggcaggtgtcatcatctccggcgcctgctgtgaactaaaaaaactggctcacaccatcaacgccccggtcatgacctccctgctggggaagggagctatcgacgaaacggacgacttggcgctggggatgctggggatgcatggaagaaaagtctctaatgattacatcaatgaaagtgatctcctgatagccattggcgttcgcttttcagatcgaacgaccggccggctcgacagtttcgcgcctgacacgaaagtgatccacatcgatatcgatcctgctgaaatcggcaagaatgttgacgtggatttaccaattgtcggggatgcccataatgtgctgaccagcctgaacaattacctaaaggagtataaagtgtccagggacgtcaccgagtgggcaaacatgatcaaagagaagaaacagaaactccggccccgagtgtcctactcggatgtgcccctgaagccacaaactgtgataaaggagatcgccgaggcattaaccagcgacagcatcttgacaacagacgtcgggcagaaccagatgtgggcagcccacttcttcgaaactcagaagccacggaagtttatcagcagtggtggcctcggcactatgggattcggattcccggcagccatcggtgctaaggtagcttgccctgagtatcccgtggtcagtcttaacggcgacggcggatttctcatggtttgtcaagagctggctaccatccgggagtatgacctccccgtgattgccattgtgctggagaatcggacacttggcatggtctaccagtggcagagcctcctgtataacggaaggcactcacagactctgctcggtaacagccccgacttcgtgaagttggccgagagcttcggtgtaaacggcgtgagaatcaccgagcctggggaaaccaaaaaggaggtagcgtccgccattaaggacaacgagccagtgctgcttaatatcgtcattgactccgaagaggcactccccatgctgcctcctggagccggaatcagtgagatgattggtgaatacaaactggagaaggacgtgattagatga

SEQ ID NO: 9901 - DNA, 333 bp, synthetic construct
  source 1..333: mol_type = other DNA
atggagctcaccaagtacatttgtcacagaaagccagagcgcagcttccacataaaaaatcatcaattcccggtctgcgcccggtgctgtggcttttacacgggactcattgtatatctgatctgctaccagttttacaaccacaactacgacctgaatatgctactgatctccatgattcttatgattcccgtggcaattgatggcttcacacagtatttcagcctgcgggaaagtaagaacaacctgcgatttatcaccgggctcatcggagggatcggcttaataatcttcctgaaaatcatcataaggtggatcttgtatgtgttgtga

SEQ ID NO: 9902 - DNA, 909 bp, synthetic construct
  source 1..909: mol_type = other DNA
atggggagtttactgagcgtgaccgacattaaggacgacgtcaagtatatcctggagctagccagcaagattaaggcaggagagatcgaagaaaaaccactaaaggataagacactcgccatgatcttccaaaaaagctcaacccggacccgagtgtcgtttgatgtgggcatgtaccagctgggcggcagagcaattttcctctctagcaacgatttgcagatggggaggggagagccaatctccgacaccgcaaaggtgctgagccggtttgttgacgggataatgattagagcgattgagcacgatgatgtcatcgaattggctaaacactcagatgtgcctgtgataagcggactgactaatcttgagcacccctgccaggccctcgccgacatgctgacaatcaaagagcatttcggtgtttggaaaggcaaaaaaatctgtttcgtgggagacggcaacaatgtatgcaactcccttctgttgatcgctccgctccttggtatgaatatgtctgtggcctgtcccaagggttacgagccttccgaaacgatcctgaaaacggctaaggagtacgccatggagaacaatactgaaattatcgtcagtgatgacatcggggtggccctggagaatgtagacgtcgtttataccgacgtgtgggtaagtatgggcgacgaagccgagacaaagcagcgcgaaatagacttcgcgccctttcaggtcaactccgacctcatgtccatagctaacgatgaagctatttttatgcactgcctgcccgcaatccgcgggcaggaggtcactggcgacgtgattgatggaccaaagtcagtgatcttcgacgaagccgagaacaggatgcatgcccaaaaggcggttctgtattactacatgaaggattga

SEQ ID NO: 9903 - DNA, 834 bp, synthetic construct
  source 1..834: mol_type = other DNA
atgaacaacatgcctaaagaccttgataagatcaaatttgagttaagcgagaagctggagtttctgaaggagaatgccgagtcggaggaggaaatagaaaagctcaacaactttgcttcttacctcgctgacaaatactcgcagatcgacgacgaagatataaaaactgaaaaattaaaccgcattaacacagggctaagctactatcaacggttcaagaaggccctggagaagaacattgacattgatcctggccggctgatggggcttacagacggcatctttggaatggtgatgaccctcctggtctttggcattgcactcccagaattgcagatcacgtactactccacctttctgtcattcttctcaagtttggcacccacaattggcgtaacggttgtcagcttcgtgctgttgagttctttttggatctaccaccatgaatttatcaaggtgaataaccttaatatcccctacctgtggctcaacgtgttctttctcatctgcatatcctttgtcccattcacaacttccctgatcgggcactacagccatttcttcttgagcgaggtcatcttcggaatcaatattctcctgaccataatctccttcctgctgatgtatcactatgccaatagcatgcactttcttgagaatgcgccctccaagaaggagcgaaattatgtgtaccagactttcggaatgatcatgggtctgaccattgtggtgaacctcctggacttccacgtgtcaagttatttcatctatctgttcctgctagttccggtaatctctaccattagggatattagattcaaaatgaacgaatga

SEQ ID NO: 9904 - DNA, 1311 bp, synthetic construct
  source 1..1311: mol_type = other DNA
atgaaggtgttagtggttggcaccggtgctagagaacatgccattgctgatgctctcaaggaggacgtggagttgtactgttacatgagtaaggtaaaccccggcatgtcaaaaatcgccgaatttaagcagggggacgagggggaggtggagaaggtggcagaatatgccgtggagaaggatatagacattgcattcattggtcccgaagctcctcttggcaagggaattgtcgacgaacttcagaaaaacgggatctcctgtgtcggaccaactcaaagtgctgctcggatagaaaccgataaatcattcatgagaaagctgtttgaggactataatatcgacggctcactggtttacaaggtgttcgataacagcgccgacgttagcgccttcctcgacgaatttgagagggatgtcgtggtcaagccggtgggattgaccggaggtaagggcgttaaaatcgtgggcgatcacctcaaagacaacgaggaagccaaggaatacagctgtgaagtgattgacaacgtgatggggggctttgcgcaggtcatcatcgaggagcggctcattggcgaggagttcacaatccaggctttctgcgatggggaacacttagcgccaatgcctgcagcacaggaccatcctcatgccttcgagggggacgtcggagcaattactggcgggatgggatcttattccgacgtcggcggactgctgccctttctcactcaaaatgactacgatgatgctgtcaagatcatggaatcgacgctaaaggctatcgcgaaagaagcggagccctacaaagggatactctatggccagttcatgcttaccgctgacgggccaaaactaatcgagtacaacgcccgctttggcgaccccgaggcaatgaatgtgctgccactgctcaaaacgcccttgatcgatgtttgccaggccatcgtggacggaaacctggataaagtggagttcaaggataaagcctccgtgtgcaaatatgtggtgcctgacggatatccggaaacagagttcgccggagatctggtggatgtagacgaggaatccatcgagaagctgggcgccaaggtattctacgcagcagtctccgccgaggacgatggtattcacctgagcggcagcagggccctggggattgtagccagtggcaatagcatcgaggaagcggagaagatagccgagaaggcctgcgagtttgtgaaaggtaatgtgtaccaccgccgagacgtcggtacaaccgaactggttaacaagcgtgtcgagcacatgaaggaaatcctgagctga

SEQ ID NO: 9905 - DNA, 1365 bp, synthetic construct
  source 1..1365: mol_type = other DNA
atggagaaaaattcaaatatagagatgatcaccggcgaccctaagaaggcaatcaacaagctgtccatacccatcatcgctagcatgttcctgattttcgccaacaacattatcgacagtgtgtgggtcgcaggactcggtgctgatcccctggctgccctaggatatgtcacgcccttgtttatggtgctgatcggaattggcaacggcatcggggctggcgggaacagcctgattagccgctatatcggtgctgagaagcggcagagcgccaacaatgccgcaatccacaacttaattttgggaatcattctgtcgattgccgtctcaataatcctgcttacctttcttaagccgctcttaatcgttatgggggcgtcagctgtgttgaagtacgcgatggattacggcattgtgatctttgcgttctcctttgctatgctgcttccaccaatcttcgggggcgccttccgcgcagaaggcgatgtcaagagagccaccatacccctcgccatttccgcgatcaccaacatgatcatcgaccctattttcatttacactttcaatttgggggtcgccggtgccgcctgggccactgttattgcacatatattcgccgtcgctgcgatgctgtattggatgcttgtgaaaaaggatacctacctgaaatataatcgtgaaagctttaaaaacgacctgaccatgtataaggacatcctggtggtgggcatccccgcctccctggagcagctgatcctgtctgcactcacaatagtggtaaatttcatgcttacaattgtttccggccctgttgcagtagctgtgtatacagccggttggcggatcatcaacatcggaatgcttccggcgatcggcgtgggtactgccgccataagcgtgtcgggagtcgcatacggcgctcggaaatacgagaatctccgaatcacggcccgctacgctgtgaaagtggccctgatagctagcattattgtgtgcattatcctgaacatatttgcaaatcagatcgcattcatattcagttactctgaaagttccgctcagctggaaccactcattgccagtttcctgcaaatcatgtgcttatttatcttgtacgttccattcggggccagtgcaggcaacgtattccagggggtggggaagggaagcattagctttattttgacatcattcagggagtttgtcctcgtgctgatctttgcctacgtactcggcttcaccctcaatatgggggagtttggcatctactgtggaatgctgctaggtggaggaattgggagcctcatctgttacatctgcattgagctatatatcaacagactgatgaggtccatcgaaagctga

SEQ ID NO: 9906 - DNA, 417 bp, synthetic construct
  source 1..417: mol_type = other DNA
atgaagtttaacgaaaacaaacccagtgccgccttcataagcatcattcacaaggaacacgcaaaatacattaacgaaaatgtgaaggacgaggacctgagcttcggcctccacccaatcctgatcataatctatgaaaacgagggaatcaatcaggagaagctggccgaagtgttgcatctgaacgagtccactataacccggaaccttaagaagctggaggataaagggtttattgagagaattaaaaataagcgaaagaagatcattaaactcacatcaaagggccgcaaaacggctcagaaagtcatcaattacgactacaaatgggatgagaagctgaagcaaaaccttaccgaagaggagtatgcgaatttcctcgaggcactgaggacaatctgcgaggaattactatga

SEQ ID NO: 9907 - DNA, 534 bp, synthetic construct
  source 1..534: mol_type = other DNA
atgaatcagaccataaacgacctgaagagtaggcgcagcatcagaaaattcaaggacaaacagatctccgacgaagacctgaagacgattttagaaaccgggacttatgccccaactgcgcgaggaatgcaatccccgaaaatcgtggtgattcagaacccggaaaccatcaaggagctgtcaaagtggaacaggagttacttccccgtggatgtccccgaggatatggaccccttctatggcgccaagacaatactaattgtcctcgcggatagcaagatgccaacatttgttgaggatggtgctagcgtactcgcagtgctggtcaatgccgctcatgcaatcggggttggatcatgctggatacaccgcgctcgggacgagttttcgtctgaaaaaggcaaggccctgctcaaaaagtggggcattcctgagtcctacgaaggaatcggccacgtggcccttgggtatcctgacatggagagccctaagcccttgccacggaaagaggattacatccactacgtggactga

SEQ ID NO: 9908 - DNA, 1701 bp, synthetic construct
  source 1..1701: mol_type = other DNA
atgtatttcgaaatcgaaaagcaggcgattgacgccattaacaaagcattagatcagtatgatgtcgaagttgaccggaattttaagctggagtttccacccaatccaaacctcggcgacctcgcgagcacaatcgcatttgccctgaccaagaagcttaaaacttcaccccctgaggttgcgaagggcctggttgagaaaatagaggtgcctgaaatcttttctaaggtgcagaattttggaccctatgtgaacttcttcatcgattacagtaaattcagcaaactcctcttggagaaggtggacgagaattacgggcaactgccagcatatggcgaaaagatcgtcttggagcacaccagcgccaacccaaacggaccactgcacattgggcacatccgaaattcgattttcggggattccctctccagattgctaaagctcgctgggcgcgatgttataacccagtactacgtcaacgacatgggaagacaaatagcgatcattgtgtgcggcataaccgaatgtggcctgaagattgaggattatgatggggacaagatagaccataaaatcggtaaactatacttcgatgccaacaaagccgtggaagaggatgaggctttaaatgataaggtggacgaacttatccgaaaatacgaggagggcagcgataagaagttaaataagatcttcgaggatgtggtcgccaagtgcatttctggaatgaaagagtccctgctgcggatgaatattgtccatgacgactttgtatgggagggccagtttgtccgcagtggggaggtcaataacctggtgaactacatccagaaggaaggattcacccgggaagaggatgtcctgttcattgatctgactgactttaatatcgacaaagagttcgtacttcggcgctccaacggaacttctctgtacagcacaagggacctggcctaccacaaatacaaggccacgctgggtgacacggtgctcgacatcctcggctcagaccacaaattggccgctaagcagattaaggttatctttgaggagattctgcggcagaaggcccctgaggtcatcttctatgaatttatcaccctgccggaggggagtatgagtaccagaaaaggtaagtttgtaagcgtggacgaactgattaacgaggccgtgtcacgtgcccatgacgaaatcaaatctagaaaccctgagcttaacgaagaggaaatcgccccgatggctgaggacatcggtgtaggagcaatcaggttcttcatcgccaaattgtcccccgaaaagcacctgacattcaagtgggacgaggctcttagcttcgaacgcggctgtgcttcgattcaatatgctcacgcacgcgcatgcaaactgcttgcaaagtcaggcaaagatatcaattccctcacggtgagtgacgactggattcctaatgaggacgagcaggagctggtgaggcagatagcgaaattcccccaggtggtggaagattgcgctaacaagcagcgagtgcataacattactcagtactgtcaggacctcgctggttcctttaacaagttctacaagagccaacaggtcatcgggagcgacctcgaaaacacaaggctaatactggttgatagggccaagacaaccatcaaaaacgccttggatatcctgggcgtggtggcacccgaaaagatgtga

SEQ ID NO: 9909 - DNA, 426 bp, synthetic construct
  source 1..426: mol_type = other DNA
atggagatcgattacaaagaaatcgcaagctatgtagtgatcctcattatagttctcatcgccgctcagcaccttaacgtcgttgtatctggctccatggagccggccttttatcggggtgacatcgtgctggtcgaaaaagccgacttcttcggcatccatgagttcaacgcgagcgatgtcaaagtcggggacgtggttgtgtacgatgcagcctggtacaaccagcccgtgatccaccgcattattaacattacggacattaatggaaccaccatgtacgtgatcaagggagataataacaatgctcctgacccctactacgtgacttcaagtcaaataaaggagaaggtggtgacagtggacgacaacctagtcgtgataccaaagatcggctatctgtccctgtggctgagggggttgtga

SEQ ID NO: 9910 - DNA, 1275 bp, synthetic construct
  source 1..1275: mol_type = other DNA
atgaatagtgaggaactgttcaacgagtctaagaactacttcccggggggcgtcaatagccctgtacgggcgttcaaaccctaccctttctttgttaaaaacgccggaggttcaaagctgaccgatgaggacggaaaaagctacatagattattgcctggcatatggcccgttaattctcgggcatgctaaccccaaggtggtcagggaggtgtctaatcagcttaccatcggcacagcatacggtacgcccactgagaatgagattactctcgccaaggaggtgatcgacagaatcccatcggctgagatggtcagattctgtaatagtgggactgaggccaccatgtccgccatccggttggcacgcggcttcacggggagagacaagattgtgaaattcgaaggagcttaccatggagcacacgactatgtgttggtgaagggcggaagtggggctgcaacattgcctgatagcgccggcatcccagtggacacaacaaagaacaccctttctgtgccatttaacgatgaggagatcctgacagacctcatcgagcgtgaaggtgacaatatcgcgtgcatcataatggaggttgtcatgggcaacgtgggctgtatcgaacccaagccgggctttctggaatttgtgcggaagatcacagaagaaaataacatagttctaatttttgatgaagtcatcaccgggtttagggcttcccgagggggagcccaggagtattatggagtcacccccgacctgaccactctgggtaaaattgttgggggcggactccctatgggagctttctgcggtaagaaagaaatcatggagctgattgccccaaacgggcccgtatatcaggccggtacttttagcggaaatcctataagcgtacaggcaggcatcagcaccctgacgcagctcaataacgccttttacaaggagctcgagaggaagggcaactttcttcgaggcaacattcaatcgataatcgatgatgaagagtataacgtgcaacccgtggggttttcatccatgtttcagatttacttcaacccagccccagtgtacaactacgcggatgcccaggaatccgaccggaaaaagttcctgcgctacttcaagtcactactgaaacaaggcgtcttcatccctccctcccagttcgagtgcaatttcatttccaacgcgcacagtatggaagacttacagaagaccagcgacgccatcgaaatttctctgcacgaggctttcaaaaaacgccgcaggtga

SEQ ID NO: 9911 - DNA, 630 bp, synthetic construct
  source 1..630: mol_type = other DNA
atgtcggacaagatgttcatgggggcatcaaccaagcaaggcttggacatcgctaataagagtagggagatcatccggaacctgatcggagacgacgtcaaagatctgaaccccgccgaaagggatattgttgagcggatcgtccacagcaccgccgatcccgagtacgcaaagctggtgaaaattagtcctgacttcgtagatgccgctatggcctccctcaaaaacaaggaaaccatcctgacggatattaacatggtgaagtatggcatcacacgctacgaaggggaggtcgagtgctatataaagaacaaagaagtgatcaaaatagctaaggagaatcagatcacaagagcagcagccgccatgcgatacgccgctgacaatggttttgagggtattgtggtttccggcaatgcgccaactgccgtgtttgaggcgatggacctatacgaaaaaggcgagatgaatcttaaggccattgtgggagtgcccgtagggttcgtcggagctgccgacagcaaggaagcgctccacaactctaacatccctaacattattgtggagggaccaaaagggggcactccgatagcagtggcttgtgtcaacagcctgatccagcatctctga

SEQ ID NO: 9912 - DNA, 1206 bp, synthetic construct
  source 1..1206: mol_type = other DNA
atggaggagtacgagatagctgtgattggcggaggaccggcaggaatcatggccgccatcgcggcctcgcaaaattcttcaagcgtcattctgcttgaaaagaacccgaagttggggcggaaactcctaaccacgggcggcgggaggtgtaacatcacgaatgcgaaaccaatacgcgagctgctgaagttctaccctcagaagaactttctcaagcacgcgttttacaccctttccaatgagaagctgctaagctttttcgagaacaaaggattaaagttcatcgaggaagcaaacaatagaatcttccctgagactgagaaaagcattgatatcctgaaaattctcaccgattacctggaggacataattatctcctacaacttcgaagtgaagagcatcgatgaggactttgtgatcaatgataagctcaaagccgataagattatcattgccacaggcggcatcacctatcccaaaactggttgcagcatcaagaactactcactgacaaagcagcccatcactgacatcaagtacggactctccccactgattacaaaaaaggacttgtctgacattgctgggataacattgtatgatgtcattgtaagttataagaagactaaggttaaggggaacgtgctcatttcccattttggtctgaccgggcccgccatcatcgacctgtccaatttcatctcggagagcataagttataacctgttggaaaacgataattgcgatattaattttgagatagccattgacctgtgccccgatttcagccgggaaaaactccaggaaaaattcaaccaggactttcaggtgaagggcaaaacgatgatcaagaattatctgaagctctttctgaccaacaacttcattgacttctttctagacgaaattaaccttgacagggaaactcaactgtcacgaatcaacaagaaaagtaagaaccgcctgatcaaaaatctgaagagtttcaacttcaaaatcaaaggttttaataacgacttggccaagatcaccgttggcggcatcgacctcaacaatgtcaatccaaaaaccatgcagtccacaatcatacctaatctgtacttcgcaggcgaagtgctcgaccttcacggacccacaggcggttataacttaaagatcgctttctcaaccgggtacctggctgggctttctgcaagcgagaaatga

SEQ ID NO: 9913 - DNA, 1320 bp, synthetic construct
  source 1..1320: mol_type = other DNA
ttgcaggggttgcttaacgactggcggcggacgcactacgctaaggagacaacccccgacatcgccggtagtgacgtgaccatcatgggatgggtccatgagatccgagatcttggcgggatcatctttgtggttatccgagatgttactggcagagtgcagctgacagctccaagtaagaaggtcgaagcggaaatactggaggacattaggaagttccgaaaagagagcgttgtggccgtgcgcggactcgttcaggaggccccaaaagccccgaacggggtggagataattcccaatgagatcaaagtactgaacttatcgaaccaacccctccccatggaccctactgagaaagttcaggccggaattgatacccggctggattccaggttcattgatctcaggaaggaaaatgtgtcagccattttcaaaattaaggggcagatgttccacaccatcagggactatttttacaacaacggattccacgagatcaatacacccaagctggtcgcttccgcaacagaaggagggacagagctgttcccaattacgtactttgaaaaagaagccttcctgggtcagagccctcagctatacaagcagatgatgatgggcgccggcatggacaaggtctttgagatcgggcaaatcttccgcgcggaggaacacgacaccctgagacacttgaacgaggctatctccatcgacgcagaggcctcattcatggacgatgtggatgtaatgaaagtgttgaatgacatgctgatcaacgtcctcaccgatgtcaacgataagtgcagtgatgaactgtctattcttggatacgaactggacgtgcctaagggaaatttccccgtggtgacatacgatgaggcggtggatatagtcaattcacgcggagtggagatggaatggggggaagacctgagccgggaagctgaaaaggcactcggcgacagcatggggggcttttactttctgaccgaatggccgtctgcaattaagccattttatgtaatgccccaagagggcgacgagaagtactcccatgctttcgacctaatgtataataaccttgagttatctagcggtgccacgcgggtgcatcagcatgacctgctcgtcaaacagatagaggaaagaggcctcaatcctgacggctttggcagctatctcaaagcatttgagtatggtatgccgccccacgcaggttgggggctgggcgccgataggctgactatggtcctcactggctccgagaacatccgtgagtgtgtgctattcccacgcgacagacaccgcctgaccccttga

SEQ ID NO: 9914 - DNA, 1284 bp, synthetic construct
  source 1..1284: mol_type = other DNA
atggaaattctgaaatactccgatattgaccttgtggagactataaagagaagcgaggaagatgtcaacaaagtgctgggcattgttagcgacattttggacaacgtgaaaaacaatcatgatctcgccatccgggagtacactgaaaagttcgatggcgtgacaatagagaatctaaaagtctcggaggacgagatcaaggaagcgtacgacacgctggacgatagtctgctagtcgccctgaagcaagcggcaagcaatatcgagaaattccacaagaagcagatcccacatgagtgggaaatcgaagtaaatccggggattgtggctgggcagatcgtcaggcctataaactccgctggctgctatatccctgggggaagggcagcctaccccagtagcatcctgatgaccgtcatccctgcgaagattgcaggggttaagaaggttgtctgcgtgacccctccccaaaaggacggtaaaattctcgacgctatactggtggccgccgacattgccggggccaatgaaatatacaaggtgggtggagctcaggctattgcaggtctggcatacggcacagaatccatcccgcaggtagaaaagattgtgggccccggcaacatcttcgtgacagctgcgaaaaaactcgtgtacgggcaggtggacattgagtttccagcaggcccatccgaggtgttgattctcgccgacgagaccgccaaccctgagttcctcgccactgatatacttgcccaggccgagcacgatcccaatgccagctgtttcttagtgaccgactctgaaaaactggcgatcgaggtggacgagtttgtaaagaaactgaccgaggttgccccacgccgggaaatcatcgaaaagagcctgtccaagagtggcaaaattattatcaccaacactttcgaggaggctatctatatcacaaacgaatacgctcccgagcatttaatcataagcaccaaagatgatgacgacacattgtcacacatcaacaatgctggctccatctttctgggtagctattcaccagtcgccgccggagattacggatcaggaactaaccacgttctgccgaccggagggggcgctaagatgtatagcggactctctaccgaagcatttatcaagaagcccacggtgcagcgaatcacgaaagagggccttaaggagctgagtaagacgtcggtccccatcgccgagtatgaagggttctttgagcacgcaaactcattcaagacacgcctcaaggacgattggaaatga

SEQ ID NO: 9915 - DNA, 1650 bp, synthetic construct
  source 1..1650: mol_type = other DNA
atgaaaagcgatagcgtcaagaaaggaatccaacgggcgccacaccggtccctactgagagcttgcgggctcgacgacgacgactttaagaagccgttcattgggatagcaaatagctttaccgacatcgttccgggccatatccacctgcgggagctggttgagtttgtaaaggaagggattatcgctgccggtgggattccattcgaatttgacaccatggccatttgcgatggaattagtatgaaccacgagggcatgaagtactcccttccttcaagggagatcatcgctgctacagtggagagtatgactaaggggcatgctttcgacggcctagtcttgatccccagctgcgataaggtggttcccggaatgatcatgggcgccacccgtgtgaatgttccctccattgtggtcaccggcggcccaatgatttcaggggaatacaaaggtaaaagtgccgacttaatcactgtgttcgaagcagtgggggctcacagcgccggaaaaatgagcgaggaagaagtctacgagctggaaaaatgtgcctgccccggtgccgggagctgtagcggactcttcacggccaatacaatggcatgcataaccgaaaccctcggcctgtctcttcccacctgtgcaaccacgcacgcccggaccgaggagaacaatcaaatagccctggattctggtaagcagattgtgaagctcgtggaggagaacatcaagccatctgatattctgactcaggagtccttcaacaatgcgatagccgtggacatggcactgggaggctctagcaacacggctcttcatatccctgctatcgccagtgaggtgaaggacttgaacgtgaacctggagctctttgacgagatttccagaaacgtgcctcacatcgccctcatcagccccgctggtgaagattccatgatggatctgcatttggcgggtggaatccaggcggtcttgaaaacactcggtgacaagattgacattaaccagctgacagtcaccggcaagacaattaaagaaaacctggaaacggtagagaacaagaacactgacgtgatccacactttggataaccccgtccatgaagatggcggaatagcaatcctgaaaggaaatcttgcccctaatggaagtgtggttaaaaagggcgccgtggccgatcatctgatgcacctgaagggacccgcaaaagtgtacgactgcgaggaggacgttaccaaagcaatcttcaatcacgaaattaaggagggggacatcgtggtcattcgctatgaaggcccaaaaggaggtccgggcatgagggagatgctaaatccaacttcagcgctggccgggatgaacatcaaggatgtcggcctgataacagatggccgcttctctggcggaacacgagggccctgtatcggccatgtatcgcctgaagcaatggagaacgggccaatagccgccatcgagaacggcgacataatcgagatcgatattaataacagatcgatcaatgtagaactctcagatgacgagatcgagaagcgattaaagtccgtgaagcaccctgaaagggagcttgacggctggctgcgcctctatcagaaactggtgcactccgctgacaccggggctatcctcaggtga

SEQ ID NO: 9916 - DNA, 1113 bp, synthetic construct
  source 1..1113: mol_type = other DNA
atgtccacactagagaaaatgaagattctgaccgactcggctcagtacgacctgtgcgattacgttagtcaccataaaagcagccagataaatttgcctggaatttatgaggcaatagggcataatggctgcaaaatcccactgttcaagaccctcatgaccaataagtgcaaaaatgattgcaagtactgtatcaaccagtccaaacgcaactttacaagattagaactatcacctgaggaactggcacgcgcgtttctcggctactataaccggggactggtgaacggtctgttcttaagttccggcataagcgatgacgtcgactccacgatggagaagcaaatcgagaccgtgagcctgcttcgaaagaagtatggttacgacgactacattcacctgaaagttatacccggcgctagcagagactcgattaagagagccatggccttggccaaccgagtgagcatcaacattgaggccgccacgtcctcaggacttgccgaactctcctccaccaaggattataataaagatatcctcaagcgcttgagctggatcaactccctccagcataaaagcactacctaccccaactctacacacacaacccagctgattatcggcgctaacaatgaaactgacaaagagattctgagtcggatggagaaaatctacaaaaagtcagacctgaagcggacatatttctctgccttcactcccatcgaggagactgagtttaagaacaaggaagcctgtagcaccgataggacctcaaagctctacaacgcagacactctgattaattcttacaagtacaacgtgaaagaactgatatttgacgaaagtgataagctttctctgacacaagatccgaagatcctcgccgcaaagaatatgaatatttttcccgtcgagatcaacagtgctcctattcgggagcttatcagggtgccgggaatcggggtaaaatctgcgcacgaaatcgtcagcatccgtaagaagaaaccattcacgcacaaggagcagctgcaggagttgggggtgatcacaaacagggctgacccatatattaagatcaacggggaatatcagaccacgttcaatttctga

SEQ ID NO: 9917 - DNA, 621 bp, synthetic construct
  source 1..621: mol_type = other DNA
atggcccgaaaaagtcttggcaagggactggcttcactgattccagatttttacaacgaagacttcgacagcaattccacgcaatcgctcgaggatattatgaatgagactgaaaataacgaagaaatcaaggacagcgaagagaagaatgcccccaaagagaaatcttccaacgatgtgaacaacaacagtaacgaagaagagatttccaaagacgaaacactggaggagtccgggaacgatgagacccagaagaatatctttgaagagatcgaggaagagaagaataatcaggagaagtccatcgacagcaacgagactaccttgaaggaggacgtctcggagaatatcaaggaaagcgagaacatatctatacagaacaacgaaaagaacacatcaacaacccaggagaccaaaatccaggaacacatcgtagaggtgaaggagatcgttgataaaaatcctcgcatcacgctgtggagttcaagatccagcgcggtgttcaggtatctccggaagaccgaaccggagttcagtattagcaaggaggcaagcaacctaattgaggaggctgtcgccaaaaaataccccgaaatatgggcactgttcgacgactactga

SEQ ID NO: 9918 - DNA, 843 bp, synthetic construct
  source 1..843: mol_type = other DNA
atgtccgagatcatcgcagtgatgaaccaaaaggggggctgtggtaaaacaactaccgtggtgaacaccgccacctctctagcagtaatgggcaaaagcgtgctggtggtggacatggaccctcaggcgaatgcgaccacgagcttcgggatcgataagactaaaattgagaatacaatatacgacgccctgatcggagacatctccgtgaagaaagccacaattcccacgtttattaaaaacttatttatcatcccaagtaatatttcgctgtccggagccggaatggagctcagccgtcgggagaactatcacattgtgctccaggaaacacttaaagatgttgtccccctatttgattacatattcatcgatctgcctccgtcactgggggtcataacagtcaatgccctcgtagcttcagacagtgtcttaattcccatccaggccgaatattatgcactcgaaggcgttgctgatttgatcaatactattaagctggtggagaagaggcttaggagtccaacccctataaagggaattttgctcactctgttcgataagagaaccagactgtccaaggacgtgcggaaagagctcaagaactacttcggcgagacaaacctgctgtttaaaaccatcatcccacgaaacatacgcttggccgaggcacccagcttcggcaaaccgtgcctgatttacgaccccgatagcaccggcacgaagtcttacctgaagctggccaaggaaatcatccagcgcgacgagaatgtccagcttaacatcgctaagaccaacatcgacaaagtgaagaaggactctgaagttgctgggggtaagtga

SEQ ID NO: 9919 - DNA, 1302 bp, synthetic construct
  source 1..1302: mol_type = other DNA
atggactataagatcacattaaacagcaatgaggtccccaaaaagtggtacaatatcaacgctgacttgccggtcgagctgccaatgcctaagaacagtgagggaaatgatcagatcagctcgctgcagaaagcctttacaaaagtgggccttgagcaggagtttagcaccgaacgtttcataaagatcccaaaggacgtgcgcaagctctacatgcagatgggacggccctcgcccctcttcagggcaacaaagcttgaggaatacctggacactccggcaaaaatatattacaaacgcgaagacacttcccccacggggtctcacaagcttaactccgcaattcctcaagcctatttcgcgaaaaaagagggcatcgagcgcttaaccacagaaaccggggccgggcaatggggcaccgctctgtccctcgcatgtaacctgcttgatctggaatgcaccgtctacatggtgaaggtgtccttccagcagaaacctgacagaaagagtatcatgaacatttacaacggcaacgtttttgcctctccaagcgaaaacactaaagttggccgggagattctagctcagaatcccaatcaccctggatctctcggtgtggccatctcagaggctatggaagaagctctggagaatgagaaggtgaagtacacactcggcagtgtcttgaatcacgtgatgctacatcagacaattatcgggcaggagctgaaaaagcagttggagattgccggtgaggagcccgatataatgatcgcctgcgccggtggcggctccaacttcgccggctcactgttcccattcattaaggataagattgcggataagagcgatactcagtttattgctgttgaaccaagtgcctgccctacgctgacgaagggaagctatgaatatgacttcggggatgtaaatggatttacccccatgctcaaaatgttcaccctgggtcacgacttcgtggcccctagcgtccatgccgggggactgaggtaccatggcatgtctccacaagtgagcctgctcaccaaggaggggtatatcgagccccgatctgctcaccaaagagacgtgtttgaggctggaataacatttgcgcggaacgaaggcgtattgcccgccccggagacgacccacgcaatcaaagtggcgatcgacgaagccctcaagtgtaaacagactggggaagaaaaaaccatcgtcatgaacttctcaggccatgggatgctggacctgaagggatacgcatcctactttgagggttcaatgcctaactccaagtga

SEQ ID NO: 9920 - DNA, 1074 bp, synthetic construct
  source 1..1074: mol_type = other DNA
atgtacactctgattatcaataatatcaagaacaacaagaagatcatgagaattttagctattgatgtgggaaccgggacacaggacatcatgatttatgacaccgaaaaggagcttgagaacagcatcaagttggttctaccctcgccccacctgtttatcagccaacagataagggatatcgagaacgacatctacttcgaaggcgagatcatgggcgggggaaagattaagaaaagcattattgagcacatcgagaagggatacgaggtcgtgatggaaccgacctgcgctaagactattcgtgacaacctggaacaggtgaagagctttggaattaagatagctgacgagtcaaaaaagtataggaattatacaaaaatcaagatgggtgatatcaacatcacgaaactcagtaagctgctactggattacgatctggaatttgacttcgacaagatcgcgatcgcagtacaggatcatgggtatagcgaaaacatgggggaccgggactttcgattcgaaaagatacgggagaagatctccaaaccaatgtctcccttggagtttggattcaccgacgacctccctgagtactacacccgcatgaatgccgtcagacgcattgtgaagcatgagggcatcgatgagattcctctcatcatggatacaaaattcgccagcatagccgggatgtgtttcgacgaggtggccgagaaactggagagttacatcgtaatagatattggcaatggccataccactgcagcatccatagatgaaggtaaaattcagggcgtgttcgagcaccacacctctagtctcacgggcgaatcacttgagcgctacattaaaaggctggccgacggcatcatcaccaatgaagaagtgtataacgatcatggacacggggcgcacgtgttgaacccaatctccgagatcgaaaaggtgatcgtctccgggccaaaacgggagctcattgaaaaaacaaaccttgactggcaccacgccgcccccggtggagacgtcatgatgactggcacggttggtctgataaaaacaatcctgggctga

SEQ ID NO: 9921 - DNA, 660 bp, synthetic construct
  source 1..660: mol_type = other DNA
atgtttaaaatggactcgcacattcacagcgagtactcctccgactcaaacagcaaaattgacgatattctgaagaaagccaacaaggagaacatcaacatcatctccataagcgaccacgacacggtcgatggcaccagtgaggtgatgcggaagacaaggaatacagacatcctggccatcccctctatagagatctcttcatcaaaaggccacatcctggggttcgggtgtgaggagaagatcccgaaggacctgccacctcaggaaaccatagaccgaatccatgacttaggcggtcttgcaattatcccccatccatactgtttctaccggcatggcctgttgtgcaagagtgacaacgaaaagctgaagatagacgctatcgagactaaaaacgcgcgcttcattgtcggatattgcaatagaaaggctaggaaactgtctattaagaaaaatctccccgcattgggtgccagtgatagccactattggaagttcgtgggggattgttatagcctgattgattgcgaaaaggatatcgatagcgtgctaaaagccatcctcaagggaaaggtaaaagcctgcggaaaaggcacctccaatattctcctgtccaagtacctacttgaaaagaacctcctcaagaagtttaaatga

SEQ ID NO: 9922 - DNA, 276 bp, synthetic construct
  source 1..276: mol_type = other DNA
atggagaacaacactatttttgtgggcagcaaacccgtgatgaattacgtgctggccgtggtcacgcagttcaatgaaggatcagacagtgtcgttctccgcgccagggggaaggccatcagccgggcggttgacgcagcagagatagtcagaaaccgattcgtgccagcttccgatgtgacagacatcaagatctccaccgaggaggtggagaactataacaaggaaaaaaccaatgtatctattatcgaaatcctgattgagaagggcgaatga

SEQ ID NO: 9923 - DNA, 1542 bp, synthetic construct
  source 1..1542: mol_type = other DNA
atgaatgcaaagaatatcgagactctgaagaaggagaacatgaatcttgctgagaaaatctatatcttcgacacgaccttgagagacggtgaacaaactcctggcgtcgcccttaccgttgatgaaaaaatccagatcgcacagaaactgaacaacctgggcgtagataagatcgaggtagggttcccggcaagcagccccggcgaaatggaatccgcaaagagaatcaaaaacagagaactggactctaggctcgtcggtctggcccgttcactcacaggagacatcgatgccgtcattgatgccgatctggactatattcatacattcataggcacgtccccactgcaccgggactacaaactcaaaaagtctaaggaagacattatccacagctccgtcgtggctattgactacgcaaaggaccatggccttacagtggagtttagcgccgaggacgccacacgcaccgagcgagattttctattcgagatattcaacgaggtggtggacgctggtgctgattttctcgatattcccgacactgtcggcgttcttacccccattgttacccgggagttaatcacagacatcaaaaataactttaagaccccgatcagtgttcacttccacaatgatttcggactcgcgacagccaacactctcaccgcgatagagtgtggggccaatcaggcccatgtaacaattaatggactgggggaaaggaccggtaactgctccctggaagaactcgtcatggctctcaagtctgcgtacaacatcgatctgggattagacaccacgcgcctgtacagcctgtcgaacctggttggccgactgacaggcgtgaagatgccagtgaacaaaccaattgtaggggacaatgcattcgctcatgagtccggcatccatgtgcacggaatcctgaacaacgcttcgacttacgagcccatgtcccccgaaatggtgggccactcacggaagatcgtgctcggaaagcacaccggagctaatgccgtgaaggccaaacttaaagaacaccacatagacctgaacgagaagcagtttgacaaggtctttaagaatattaaaagcctgggggataacgggaagtgcgtgacggatgatgatttaatagctattgcgattacagagcttgcgagtgcacgggagaccccaatcgtgattaaggggttgagtatctcaatgggagccaatgtttctcctacggccactgtgaagctagagattgatggcgtggaaaaagagaccgccagtactggagtggggcctgtggacgcagccctcaacgccattcgcgagctgatacaggacacaatggacatcgagctagaagaatataacctggaggccattaccggtgggaccgacgccctcgccgaggtgttcgtcatcagctctgactccgacggcaacaaaagcaccggccgctcaactaatcaagatatcgtcatggcaagtatattggctgtgttggattccatcaataagttgctgctgatcaacaggagcatcctgtga

SEQ ID NO: 9924 - DNA, 1206 bp, synthetic construct
  source 1..1206: mol_type = other DNA
atgtataagaagctcttcatcggcatactcatctgcctgcttgtcatcagcccaattgctgccgccaactggaacagcttcgcggggggagtggaccacaacgcatttcgggaagagagttcggactttgtaacgaatctttggacctttaacatggagtcccctattcactcatctcccgcagtgtacaaagacttcatttatgtggtgtccacccaggggattttgaaagtgattaatatggaaacaggcgagaaggactgggactttgatctggagagcaataccaactcttcccccatcattaacagcaataagctgttcattggaactgaggatggtatcaaagcgattaatatcaataaccataacgaaatctgggattatgactgtgatgatgtggaaagcacccccttcctgtataaagatacaatctactttggcagtgacgacgggcatctgtacggactagataaggataacggcaaggtggtcttcaataagaagctcgatggagaacttaaatcctccccaatcgtagtcgacgatacaatctacattggctctacaaactgcaagttgtacagtatcggaaccgacaaggataaaaattgggagttcacaaccggggacgagatcttatcttcccctagtttcatcaatgacactattgtgttcggcagcaacgacggcaatatctattgcttaaacgagagcgacggggccctgaattggaaagttgacctcaacaataaggtgctaagctcacctaccgtggataatcacgacaataacatttttatagggtccgacgaaggcaacctgacgtgtatcgacaacagggacgggactataaagtggtcgcactcagtgggtggtaaaatacagtcaacccccgccatcaaggataatctcgttgtgttcggttcggacaacggcaatctgtacgttttgaacaaatacactgggagtgaggaatttacctacaacccaggaacaatcctgttcaacagcgccatcaatagctcaccggtcatcaacggcaacagtctgatatttggcgatgatagcggcaacgtctactctctgaacattgacaagcatgaggtcccgggaagcacgcaaatgtatttctccatttccgtgctcataatcatcgtcattgtagctctggttatcgtgcacaaagtcaagggacgcaagtga

SEQ ID NO: 9925 - DNA, 1155 bp, synthetic construct
  source 1..1155: mol_type = other DNA
atgctagagttcaagaagttctggtggatgattaaaaaagaggtcctgagtctgaagcggcaccccgctaggctggtgtctattatcgcctttcccataatcatgatcctcctctttggttacggaatggggggcgagatgaccgacctgccgattctggtggtgtcgcagagtcacgggaacctgaccgacctcacactcgatacgattaaaaccaccgaaacttacaaggtgatcgaggttatcgacgacttggatgagggcaagaaacgcgtggatagcggcgaggtaaaggcagcgatcatcctgcctagcgattatgacgataacagcacacagcaaaagtcggttaccttgtacttggactcctccgaccaaatggcttcccagatcttagactcctcaactcaggccatattctctcgcctctcaaatatggtggcttcccagacgaatgtggaaaacaaagatgccaacatcaatccatccatctcaaacagctttaacaacttcaaagacgacattagcttacatatcaatcgcatctacgggaacattaagtacattgacttcctggtgccggcaatccttggtatgaccgtcatgatgagttgcatgatgggcatgggggccacaatcgccggcgaacgtgaaaccggcgagcttgcacggctgttcatgactcccacaagcgtgagcaccgtgattggagggaaaattgcggccaagctcctaatcgagctgcttagagccctgatactgatcttcatggctgtactccttttcaacgttagtataaagggaggtatcctccagacttttatagtccttgtcgtgggagctctgtgttttgtgggatttggcatgatgttgagcgcaagaacctctacgcaggaggactatgtgcaaatggtcatgccattttcaatgcctatgatgtttatcagcggggtcttctatcctatcgaaacaatgccatggatactccagaaactggcctatatcttccccctcacttacttaaatgatgccatgaggggaattatgctaaagggtcagaccctgggggatgtctggctggatctggcggtgctgctgggcttcacattgctgttcttcattattggcgttaagcggtttaatcgagacgtatga

SEQ ID NO: 9926 - DNA, 1047 bp, synthetic construct
  source 1..1047: mol_type = other DNA
atgaaaaacgcaatcgaaactaacaatcttaccaaggtctacggtaacttcaccgcggtcaattctctcaatctgaaaatccccaataacagcattttcggaatgcttggccccaacggggcaggaaaaaccacaacaatcaagatgcttacttgtctcatccagccgacttcgggcaaggccgtcgtggggggatatgatgtggaaaagaaccctgacgaggtgagaaatctcctaggcatggttccccagcaggtcagtttgtacaaggacctgacagttatggaaaactcccagatgtgcgctgactattacgggataccaagcgatgagcgggacgcgcggatcgaagacctgatggaattggttgacattaagtacgccaagaataagcgagtggggcaactctccggcggccagaagcagaaagcatccctggtagccagtctggtccaccgcccagacatccttttcttggatgagccaaccattggcctagaccctacgaccaaacggactttatgggacctgattcgcgatttgaacgatgagggccataccataatcctctgctcacacgacatgcatgaggtagatatgctctgcgacaatgtgggaatcattaacaccgggaacctggtggcttatgatacaccccagggcctgaaggacagcctcctggaggccaacaagaagaaaatgacagaggccctgggaaagatcagcgatgagacgaagatatcaacgagcacgaaagaagacatcggcaacctgggactgaggaaaatgtcaatactgctgaagaaccagaacgaagaaatcattgaggctatcaaaacatccgatttcgtgaaaaccgtggagattgcccacaacggtcgtattaatttaagaatcgacagttacgatgacatggccgtgcaaaacgtgctcaaggacatcaattcttttggtggggtaataaagagcatctacactgaggaaccttccctggaggatgtctttattaaagcaaccgccgaggtggatgagaatgctagggtgtga

SEQ ID NO: 9927 - DNA, 408 bp, synthetic construct
  source 1..408: mol_type = other DNA
atgacagacaaggaaatatatgacacacagaccatgctgatcaaacactattccaatggtctgacccggaatctgattctgtggattatctccaaggaaaagatccatggctacggcataatgaaaaagctagacgagtttttcaacttcgaggacgtgaactacgagatcaagaatacgagcagtaaagtctatccaatcttgaggaaaatggagaagaacggactcatcatcggcgaatgggatattaacgagaacaataaaagagtaaagtactactctattactgacgagggactgataatccttgataagatccgaagcattatcaactttatctcaaataaccccgcctggctcaacttctacggggatatgggggtggagattaacgaaaagcgcaattga

SEQ ID NO: 9928 - DNA, 714 bp, synthetic construct
  source 1..714: mol_type = other DNA
atgaagctcggattcacgaccctggccctgttcatggaggataacaacaagatcatcgagctagccaagcagcacgggtttgaaataattgaaattctcggcgaagatccattctacgagaaagacaaaggcgagtttaagaactgtggcatagacatgcgaatccatgccgcgacagtcgacatcaacattgcaagcctcaataaaggaatccggactgagtccatcaagcagatgatccagtgtggccactatgctgaatcgatcaacgctaatacaatcacgctgcaccccggcataatcggccggaacgaacctcgcctcaggaaatgggcacttgagattgccgtggagagtatcggaaagatcattgacaacaccaatattgagatatcaatcgagaatatgccggtaagagggaagttcctgggcaataaagtggaggagattgaaatgatccaggaggaaactgggtgcagcttgaccatcgataccgggcacggaaacacctgcggaaacctggaggaaatgctgaatctgaaaaacatctcctactgccatcttaacgacaacaacggtgtcaaggaccaacacattacactcggggagggtactctggacctaaatctgcttaagaaaatagatacagccattattgagttgaacaattttaataatatcctgaagagcaagaaggtgatcgaaaacttatga

SEQ ID NO: 9929 - DNA, 795 bp, synthetic construct
  source 1..795: mol_type = other DNA
atgaagaaagcagtggtcttcgataactccgggacactcattgagcggtaccgcgtgattaaggacgttctgaatggcaacctcttcacagacattaactccctcgatctgatcgacgccgctgacgccctcgcgttggtggtccttcagttcaacacaaataaactgttagatcttgaccagaacaccttgatctctggcgtgatcagggagtacaacattgactttgacgtcagcttttcaaccaatccgatttctaaggccgaagtgaaggagatcatcgataatgagaaaagcgccaccatagcagatatcaccgacgggtttgatatcctgagagataaggtgcctaatatggagctatgcaacggaagcgcactgatcgtggacatggacctaggggtgatagcatatactataacgagcgccggcaagttctttcccaaggtgtttgagaccattgagactctgaaatcacgcggaattgaaatcttcatcgcttccggcgaccgaaagggagcgatcaaccggctggctaacctgcttgacatcccagaagacaatgccttcggcactgtcagtaccaggggtaagtgtgaggtggtgtccatcctcaaggatagtggatacaaagtcatgatggttggggatggtatcaacgatctgttggctttcaaaaatgccgacgtcagcgtactgacaatagaacaacaggaagagatatcgcccaaagtaatggataagaccgaccacatcattgaggatatcttcgaagttacgatgattgacttttga

SEQ ID NO: 9930 - DNA, 1371 bp, synthetic construct
  source 1..1371: mol_type = other DNA
atgaatgtgattgagaagctgaactccattaagaatggagagataacagctaaagaaaatgtggagaacttcatcaaagtgatcgacgagaataacgagagtatcaacgcatttattgaattaaactatgaaaatgcgctgaagcaggccgacgttatcgacgcaaagatagcgaacggagaagacgttggggcgctcgcgggcatagtattcggtattaaagcaaacattaacgtggaggacctgatcatctcagccgcctcaaagactttggaaaactacatcggcagttacaatgccacagtcgtgaaggaaatcctggatgaggacgggattatcatcggtatcttgaatatggacgaatttgctgccggaagttcaaccgaaacctcctactacggccctacacagaaccccgcggccatgggacgaatccccggagggtcatccggaggctgcgccgcagcaatagctgggaagatgtgtgacatctccatcggctcggacactggcggctctataagaaacccagcatctcactgcggggtcatcggcttcaaacccacctatggggccgttagcagacaaggattgcttgacctgtccatgagtctggaccagattggaccgctcagcaatgacgtgagcgggattgccctcacactcaatactatcgccaagtacgatgagacggagtgtaccaccctgaactgggataaacccgatttcaccaacgtcctggatgacaccagcttaaagggcatgaagattgccgtgtgtaaagagttcattgacgtaacagatgatgagattaacaagacggtcaaccaggccatcaataaacttgtggaagcaggcgctgagcttgttgaagtgagctttgactacatcaacctgtgcctacccacatattacctgattaactatgtagaatttttctccgccacgcggaaatatgatggccgcgagtatgggtcgcggatcgaggaggtgtgcggcgatgaggtccttcgtaggataaagatagggtctcacatcgctgaggctgagtttagcggtaaatactacaaacaggccctcaaggcaaggagcgtgatccgcagcgagatcacctccatgctcgagaatgtggatctgattgtcggaccaaccgtgcccaagctgcctcatgaaatcggtgctgaactggagccaatggaaatgtatgcttacgatatcctgactgtgattgccaatctggccggtatcccagccgcaagcatacctgctggcgaggtcgacgggattcctgtcggcctccaattgcaggctaagccgctagacgatctcaaaattatcaaggccatgagtgtgttcgagaacactcagtga

SEQ ID NO: 9931 - DNA, 1506 bp, synthetic construct
  source 1..1506: mol_type = other DNA
atgaccagaatcgggctggtttatgtgaacggggctgtgccggggttcgaggacttcggcaacctgcccactgacatcgtgaaggagaacggacttattgatggcttcaaagctagcaacgaattggacgccttgatcattcctggcggcacactcatcgagagcaatgacatcaacatggatctcaacacggaaattaagaagatggcctccgacggaaagccagtgatcggcatttgcgctgggtttcagctactgtccaatcagatcgatatcgggcgcaagtcccccgtcccgatcgtgaaggagggtctgggcataatcgatgtaaacttctcccccctgatcacaagtgaccgtgtcaaagccaaggtctttaataactcttttctggtgaagggtcagaaagaggatgttgatgggttccatactcacacgtatgggaaggtggaaggagacgctaagccactcttctactcccaggttcaaagaatgaattacggggatacaaacaagaatggcgagtacaacatcttcagcggtgcctgtaatgacgacggcaacgtgatcggcaccatgatccacggcatactggacgaaaatccaatccttatcaagaacctattagagcagatcgacgctgcaaatattgacgacatatactccaggaacatcgagatcaaaaagtacttgcaatccgaggtgggcatcaacaccaacattaaggttcctaaactcgacattaagtgcaagaaacctaaatatctaatgattggaagtaacggaagcgatagtggaaagaccttcattgtcactggcctcgcaggagcgctgcggcgacggggatacaaggtggccctgctcaagattggtcccgatgtacgggacattatacccggcctgtatctgacaaaaggaaagatggagaaattctcaagcattaagatcggtcacttagggtggagtgatattgaatcgaccataagcaaactcaactcaagcaactatgatatcgtgctgattgaaggagtcatgagtgtctttacgggccttctgaatgaaaaggtcccctttagcgccgccgaaatcgccatgtctagcaagatccccatgatattgatttcaggtgtgaacaaggggggcattgaaagcgcggccgttgacctcgtgtctcattctaatatgcttgagaaattcggaatccctgtcaaggcaatacttctcaacaaagtatactccgaggatattttcaacgaggtaattccttacatcaagaataacaccactgtggacacagtgctgaaactgccaaagataaaatcagcagacatgaggggctttattccagaagtggagatccgctatgagctgtttaccaatcacgccatggacctgatcgagaacaacctgaatatcgatgaaattatcaatatggcgagggaagtcgagtttgagaaaatatacaatttcaacgagatcaaaaataaaatggtgaatgggtcgtga

SEQ ID NO: 9932 - DNA, 684 bp, synthetic construct
  source 1..684: mol_type = other DNA
atgaaccaggaaacgaatctcgacaaggccttggaagccattcgcaacggggagttcgtcctcgtgtttgacgacgacgatagggagggcgaagtggatatgatcatcgcttcagagttcgtcacccctaagagcattgccacaatgagagacaacgccggtggcttaatctgcaattgcatacactccgacttctgtgatgagatacatttgccattcatggttgatattatggaggcggccagtgaaaagtacccagagctggccaagctggcacccaacgacattccctatgatgagcggagctcattctcgatctgggtgaatcaccgcaagtccttcaccggtgtcacagatcacgacagggccatgacaatcagtgaatgcgctatcatgatgaaagaaggccgatttgacgagtttggaagcacgttcaggtccccggggcatgtatgtctgctgcgtggagcagatggcctggtcaaaaaccggagaggccacaccgaaatagggctggctctatgcgagatggccggggtgactcccgtgtgtgtggtttgcgagatgatggacggggaaactggacaagcaaccagcgtggcggatgctcggaaatttgcacaggagaacggactgatccttcttaagggcgaggacatcattaataaatacctcgaggactga

SEQ ID NO: 9933 - DNA, 381 bp, synthetic construct
  source 1..381: mol_type = other DNA
atgaagattgacggcgaggttacaacgggtctgggcaaggccgcatactttctgtcccaggagttctacacaaatgaatttaagaagaatttagggttcgtacctttcccaggaaccctcaacgtcatcgtgagcgataactatctggacgaaataaacgaaatcaaaaacaattgcaagaacctaatcaagcccgacaaggggttcggagctgtgaaatatattaaggcaaaattgaacgataacatcgacggcgccatcgtcttcccggcgaaaactacccacgaggagaactacctcgagtttattagcaaaaataagctccgggacgaactggccctgaatgatggggatatagtgagtcttgagtttcagaactga

SEQ ID NO: 9934 - DNA, 1644 bp, synthetic construct
  source 1..1644: mol_type = other DNA
atgaaaataaagactatcagcaccgatgtcctcatcatcggctctgggggagcagggtcaagagccgccatcgaagtggataacgctggactgaaagccataattgtaagcaaaggtctgagctttcgctctgggtgcacgggcatggcggaaggcggatacaacgccgtctttaaaacagtggacaaggacgattcaaaggaggcccacatctacgacacactgaaggggggaagttaccttaacgacgagaagctcgtagagatcctggtgaatgaaagcccacagcgccttatcgacctggagaactacggggctctgttcgaccgccaagagtctggcgagatagatcaacgcccgttcggtggacagacctaccgccggacgtgttatcagggcgaccgaactggggccgagctgctcaacgccctcaaggaagaaatcatcaagagagacattgagtgcattgaggaggtgatgatcacatccctcatcaccgacaaaaaccaggtgattggcgcaactgggcttgacctcaaggattcctccctgatttactttaaggcaaaaagcaccatcctcgctagtggaggggcgggccaactgtaccctgtgacatcaaacaccttccagaaaaatggcgacggttatgccatagcgtacaaggcgggagccaagcttatcgacatggagcaggtccagttccatcccaccgggatggttgcccccgagtccaagaagggcgtgctagttacagaggctgtaagggctgaaggcggaaagctgttaaataaagacggcgccagattcatgaggaagtatgcacccgaaaagatggagctggccacccgggatattgttgcccggagcatttaccaggaaataatcgaggggcggggaactgagaagggcggagtttatctagacattagccacctggatgatgactatatcgacgaaaagctggagacaatggtgttgcagttcaataacgtctccatcgacattaagcatgaacccattgaggtggcaccaactgcccaccacttcatgggcggtttgaaaatcaatacggatgccagcacatccctaaggaacttgttcggtgctggcgaggtgtgcggaggcgtccatggtgctaaccgactgggcggcaacgcactcgcggacacgcaggtctttggaaaaattgccggtgagtccgcaagtaaggcctgtgctgacaccgagatcaagaccgattatgagcaggtcaaacgggagagctccagaatcgagaacttgattaagaaagggaatatcaagccacagaaattcaaagagaacattaagaacctgatgtgggagaaagtggctatcgtgcgggatgaaaaaaccttgaatgaggggctgaaggacctccaggatatgcagaaagaattaaataacctcgatgtgagcgataaaaagcaatacaacaccgaactggtgactgcacttgaagtgatcaatatggttgaaatctgcattctgattgtcaagtctgccatactgcgtagagagtcgaggggctcacactttaggtcggacttccctgaaagtaaggatgaatggaagaaaagtatcatatttaataaagacaagatcgaatttgaggctcgatga

SEQ ID NO: 9935 - DNA, 1305 bp, synthetic construct
  source 1..1305: mol_type = other DNA
atgaatgacaacaccatcctgatcaaaaatgcactgatcctcagtccaaatacaaactttgagaacaaacagtcgatcctgataaaggacaacctgattgccgagatcagccccgacatcgatgagagcaatgtcagtaaaattatagacgccaccgggaagatcctcctgccgggactgatcaacacgcatactcacctgtccatgacactgtttagaggtcttgccgatgatctgagcttggacagttggctaaatgattacatatggcccatggaagctaatcttaacggcgattactgctacattggggcgcttctcggcgctgtcgagctcatcaagagcggaacaaccaccttcagcgacatgtatttctacatggaagatgtcgcgcgggccgtggacgaatcaggcatcagggccgtgctctcatatgggatgatcgatttcggcgatgaagacaagcgcaagaacgagataaatgagaatctcgagctctttaaaagttgcgagggcatgggcaacgggcgaattaaggttttcttgggcccgcacagcccctacactgcctctgaagagttgcttatccaggtccgcgagctggccgacgagtatgacatgggtattcacatccacgtgagcgagacccagaaagagatcgtagatatctcatctgaaaaggggttacggccctttgaatatctggataaaattggattcctgggccctgacgtggtggccgcacactgtgtctggctgtccgacaacgagattgaaatcattaagaagaacaacgtaaagatctcacataatccatgcagtaacatgaagctggcgtccggaatcgccccagtttccaaactgatcgagaacgacatttgtgtgtccatcggaacggatggagcttctagcaacaacaacctagatcttattgaagagttgaagacagcttccctactgcagaaagtgagcactctcgaccctaaagtgttgacttccgatgaaaccctgtcgatgggaacaatcaaaggggccgagacgctcggcctggagagcgagattggttcgatagaggttggtaagaaagcagacattatcttaattgacaccaattcagccaacatgattcctgactccagctctttaagtagcaacatcatttactccgcaaacggcctcaatgtggacacaaccatttgcgacggcaagatactgatggagaataagaagctgaccgtgctggatgaaggggaaatctaccagaaggctaggcaagcaataaaggaacttaaagaagctatctga

SEQ ID NO: 9936 - DNA, 207 bp, synthetic construct
  source 1..207: mol_type = other DNA
atgagcgagataccaaaggcccccgtcgcacggatcattaaggaaagcggcgcagagagagtgtccgaagatgccaaggcggaactagccgcatacctcgaggacgtggctcgcaatgtcgctaaggaggccaacgctgtagccaaaattgcgaaaaggaagaccgtgaaggccgaggacatcaaactggccatcaaaaacctgtga

SEQ ID NO: 9937 - DNA, 864 bp, synthetic construct
  source 1..864: mol_type = other DNA
atgatgaaaatcaagattgcaattccatcgaagggccgaatcagtgaaccttctataaacatcctcgagaaggcagggctcgggctgatcgacaaaaacaacagaaaactaatttcaaagaccttcaacgaagacatagaagtgatgtttgcccgcgcatctgacatccccgagtttgtcaacgatggagtggccgacatgggcattaccggggtggatctgatcaacgagaacgaggccgatgtgatagagctgctcgacctccggttcggtcagaccaaactggttctggccgctccagaagaatccaatataaattccgtggatgatattaccgaagagatgaaagtcgctaccgagttccccgtcctgacgaagaagtaccttgacaagaagggcttatccttaaaaatcgtgaaactaagcggatcaacagaagcggccccgttcattggaatcgcggatttgatcactgacctgaccagtacgggaacaactctgaagatgaatcacctccagatcatcgacaacattctggatagcaccatcaagctgatcggcaataaatatagcctgaagaacaagaaggagctgattgaggccgttagtacaagcattaaaggcgtgcttgacgctgaacggaaaaagcttatcatgatgaatgtgaagaatgacgatttggacaaggtcaaagaggtaatgccttccatgggcgggttgacaatctctgaggtcctgagcaacgagaagactgttgctgtgcaagcagtgattgatgagaaggaagtgtttgagctcgtcaactgcctcaggaatgccggtgccaaagacatcctggtagtacccattgagaggataatctga

SEQ ID NO: 9938 - DNA, 495 bp, synthetic construct
  source 1..495: mol_type = other DNA
atgaagatcgggatcatctacagcacgtcgaaaaaatcaactaaaaaggcctgtaaaatcctagctagcaaaatcaacactgatgtgcagctgataccgatcgaaaaagcaaagacaacctgcattctgaaatataatttcatcatcttcatcgcgtccgcctacaacggcaagtttcagagctccctcaagaggtatatcattcgcaacattaagaccatcaaggagaagcccattgccctggtcattaacagcgaagagaacattaacacagaggacatattcaacaagatctttaccgaggagctggtaaattcctcatgcattaacagcaacttcggatacgagctcaatatcaatgaaggcaatttctttgagaagataaagaccaagaacaagattaagaataaggagaaccttccaagtctgaacatcgacgaaatcaataaatttagtgattacataaacaatttgattgaaaaacgggtggactga

SEQ ID NO: 9939 - DNA, 936 bp, synthetic construct
  source 1..936: mol_type = other DNA
ttgatcaagattttccgcctaaagaacataattagcgtgaaggacttcgagagaaaggatatcgagtatatcctagacgaggcgagcaaactggaaaacattgccaaatctagagagatatcggaagagctgaagggaaaaatcctgggcctgatgttcttcgaacccagcacaaggacgaagatgtcatttgaaacatccatgaagcgtctgagcggggaatgtatcggatttgagaactccggaagcagttccgtgtctaagggtgagagtattgcagacacggcaaaaatgttcgagggctactgcgacgccttagtgatccgccacgagcttgaaggagtcagtaaatttatctccgatattgtagacgtccctgtcattaatgcaggggacggcgctgggcagcacccaacccagaccctcttggacttatacactattaagaacgagatcggcgagattgataatctgaagatcgccctgatcggtgaccttaagtttggccggaccgttcatagcctgacacatgccctcgggctcttcaaaaatataaagatatacctcatctcaccacctgagctgaagatgccgcaggaggtgctgcacgacttgaacaagaccaatgttgagtataaagaaatcggcagcatcgaagaaatcattgatgatgtcaacgtgctgtatgtaactaggatacagaaagagcggttcgccgatatcaatgactacctcaaaatcaaaggggcctacatcatcaataagaacatgcttgaaggcaaagatctcattattatgcaccccctcccacgaattgacgagatagacactaacgtggataataccaagtataataagtactttacccaagctgctaacgcggtgcccgtgcggatggccatcctgaagacactgatcaagaacaaccccaaatga

SEQ ID NO: 9940 - DNA, 1164 bp, synthetic construct
  source 1..1164: mol_type = other DNA
atgagtaacatctttgaagatctggaaaacgatgagacacaggggcccactatatttaaggacaagcgccctctggatcatagatggctgccagacaaactggtgcaccgcgaagagcagattaggcaaatcgccaagaattggattgacgtgttgagcaacgtcactccgagcaacgtgactctctacggtaaaaccggaaccgggaagacagctgccagcaaattcgcccgggagcagctgatcgacatcgcgcgtaagaagaacatttttgtcaaagtggagtacatccgatgcacggattatacaactgagtatcaggtcatcgcagagctgtgcaacaaactcggccgggacgtgccaaatcggggctggacaaagggcgaagtggtcaatacatttcgagacatcttcaagaccaacgcattcggcaagaagctgcatctgatcgtgatcctagatgagattgatatcttactcgataaggacggggacggaatcttgtacacgctgacccgaactgaaaacgttagcgtactctgtatcagcaactacctcgattttaaaaacttgattaaatctagggtgaccagtagtcttaacgataaagagatagtcttccctccctatggcgccgaccagctaagcgacattctgaaggaaagggccgagctctccttcaacgagaacgtcttggaaaatgacgtgatcccactgtgctcagccatggccgctaaagaggagggggacgccaggtacgctctcgacctgcttaagaatgcgggggagctcgcgttcgatgaagattcagagaaagtgaccaataaccacgtaaaaagagcaaaggacaagatagagcacaacaaggtgattgagatcatatccacgttgcccctgcagcagcagcgggttttagagtctatcctgaatctgaccaaacaaaaggaagagattacatcgggtaaactgtatgaagcttataccgacctgtacaagaaggacgcagttacttaccgcagaatatttgacttcattaatgaacttgagatgcttggaatcatatccaccaatacaatctcccgcggccggggcaagggaagaacgaatatcattaagctacaatgtgatgaaaccctgcttgagaccaccctcttctctatttga

SEQ ID NO: 9941 - DNA, 459 bp, synthetic construct
  source 1..459: mol_type = other DNA
atgatcaatgagaaaacaattgagaagtggcttcttgatgaagacatgctgcgggaaatgaagtttgatgagaacgctgattttcactttattatcgagtttccaaaagacaacatcatcgatattgtaaaaccgaagcagaaggattgtatcgtcttcgcctgcgccacccaagtgagccaggagcatattaacttgatggtgagtgcagacctgaagactaaaaaggacttcattctggagctgaacttcggcctcaataatttcttagtggactacgaactgcaaatccacgacgaaatgctacagcagttcatcatcacggaccagatattcgaagatgggctcaccaaggacaactttatcaagacaataaaaagggtcttcaaaagcaaactccactgcatctggctgattgagaagaagttcaacaatccttccttttcacccataaagtga

SEQ ID NO: 9942 - DNA, 1035 bp, synthetic construct
  source 1..1035: mol_type = other DNA
atggtgtacaatgagctcatcaataacatcaacctaataaatataaacaacatcatttcattctacctgtttctatttatcatattcgccctgttactctcactggtaatcgatgtcctctttggggagctccccggaaagatacaccctgtggtcataatggggagcttgatcaacttttttaagaaaaagttcattaatatcaaaaactgggcatccggcttgatgctggttctgtgtacctccgttatctccagtgtcctactgctgatcatctacaccatcattaagaataatattatcctgcttttcctggtcttcagcatcctgctgtcgtccacatttagcgtgaagatgctgctgcaaacagctattgatgtgaaaaacgaccttgataacgacatcaagaaagcccggaagtcagtgagctatctggtgagtcgaaacacggaagatctctcggaatgcttcattgtgtctgccgtgattgaaagtctcaccgagaatataactgactcttacgttgcaccaatcttctattacatcattttcgcgatcttcattctgttttatcccgtgcatttgaagttgtatctgctgttgctcgtacccatgctttataggctgagcaacacgcacgatgcgatgcttggatataaaactcaggagctcatctacatcggtttcctgccggcaaagatagacgacattctcaattatattccttccagaatcgccggcctgtttatcgtgatgtctgcctacttacttaacctcgacgggaaaaacagtttcaaaatcatgatgcgggacgctcgcaagtgcccaagcccaaacagcggatacaccatggcatccaccgccggcgccctgaatatccagttgatcaagaaggatacatacattctcggcgacaacaataaaataatcaccgctaacgacatttccagcgctgtcaaactgagcaagctgtcaattattcttttcacactgactattatctgcttatttatcctaatctacgtgattctctga

SEQ ID NO: 9943 - DNA, 1014 bp, synthetic construct
  source 1..1014: mol_type = other DNA
atgaagttggcgatcatctccgttagtaataagggccagaagctggccttcaagctcaaggaaaagctcaacgaggactcaactatcctgaaggtcgatctgtaccacaaaaatgtgaagaagtactttcagatccttttctacgaatacgatgcaatcatagcaattatggcttctggcattttaatccggacaatcgcccccctaatagaaagcaaggtgaccgatccggctattctgaacattgacgacaacgggaatttcgtgatctctactctcagcggccacctggggggagctaataaactaacagacaaaatcgccaacctgatcgatgcaattccagtcattaccacctccacggacgttaataaaaagcttggaatagacattctcgccaaagatctctatttgtccattaataataccaaggagattctcttctttaacaaatcaatcctcgagggcgaacaactgaatttcacaattaacccaaataagaacttcgactatctgtttaactacttgaaaaatatcaccctggagatcgacgtctcgtttagctactcaaacaacattaatacagacgagatacatgtgaaacttgataaccacaagataatccttaaagagagaaaaatcgtggtgggaatcggctgccgccgaggaaaggaatgcagcgacatttataaaagtctcattaagagcattaacgagctgaacatcgataaatcaaggatcaacatgttcagtagcgccgagatcaagaaaaacgagcaggggatcttagaactaagcgacaagctgaacatacccgtgaatttcgtagagttggacaagctgaagctgttcgaaagcaacgatatccagaagtcggagtttgtatactccaaattcggcatttatggtgtctgtgagcctagcgcgctgatcacggccggttttgacagtaaactgatatataagaagacctcctacgatggggtgactatctccatcgccctgagcaagtga

SEQ ID NO: 9944 - DNA, 246 bp, synthetic construct
  source 1..246: mol_type = other DNA
atgagttcccagattgacgaggtctgcgaaatactggagtacatcgccgataacaacaccgtaccgcgcaatattcgggaggctgccgggaagtccagcaccctgctcaaggacgaggagcaggatcaaagcgtgaagatttcgacggtccttggcaaactagacgaaatcagcaatgacccaaacatccccgtgcacgcaaggacactgatctgggaagtgttgagcaaactcgaatcaatctga

SEQ ID NO: 9945 - DNA, 177 bp, synthetic construct
  source 1..177: mol_type = other DNA
atgtccgacatctccaggaccacaataaacctgcccgtggatctgaaaaaggagctcaagaaactggccatcgacgaagatacgagcctctcggggctaattattaagatgatcaatgagggcatggagaatcggaagaacagcaacatcagctactcagacgaagacaacagttga

SEQ ID NO: 9946 - DNA, 582 bp, synthetic construct
  source 1..582: mol_type = other DNA
atgaaaaagcatataaatgaaattatcaacgtgtctaatgagatttacaacaaaggcctggtgtctggcaaagccggaaatatcagtaagcggatcaagggcagtacgggcgacattgtggcaattacccccacactcaagtccctgtcgtacctaaaggaggaagacatcgtactggtcgacatggatgggaacttgctgactaggggaaaaccgtcctcagagctgaacatgcacttagaaatctataagaagcgctctgacgtcaacgcgatcgtgcacactcacagcacatacgccaccggcttcgcctttagctccaagaagcttaagagactggaagggttcggagagatcaagaatccttacctgaacagcatcgagtattttaaaccagggaccagcgagttggctaaaaacgctagcgagggtataaaaaacgaagatgttctcatccttaaaaatcatggtgtgatatgcgttagtgataagctgaaagaagcaaagctgctctcaattttcgtggaggagagcgccaagacccagttcgtcacatgtatgctcaactccgtggaggactga

SEQ ID NO: 9947 - DNA, 1722 bp, synthetic construct
  source 1..1722: mol_type = other DNA
atgtcaactaacaaaattctactgaagttcgctaagaagggcatcaacctcagccctgaagcctacaataaggtgatcaatgctaaagatcctatcaactacgcaagctccctcatagtgaaactgaagagcgacaaatttagcccaaaagatctgatttcggtgagtggagagatggtggatgaaatcaacgggattaagaaggaagagtccaacaaccagaagagcctgaccgaggatataacacataatgaggagatcaagattaagaaggagagtataaaagaaacaccctcggagatccagccccaaatcaaagtggacacaaaggcagaaaataagcaagatctgtccattatcaaaaaggaagataccatcgacaacctgaaaaaggaaagtgacactcccgagaaatatataaacaaggaaattttagaggccagcgagaccatcaaagacgagaagattaagtttaaaaggaatgagcagaagacgaatgtgaagtacgatttcaaaataatacaggacacttccaagaagtcatatacaagtggtgaaattgagaacctgatttcctactttaagagcagatacgaaaaactcagcaacatcttatccaaacgaccagagcttaggaattatactaagatcgcggatatcgatgacagccaggagaacctgagcctgatactgatggtgcgtgagatccggaccagtaagaacgggcataagatcatcgaatttgaggacgataccggcacaatttcaatcttgttctcacacaataatgaagagctatttgccgaagcggaaaagcttgtcaaagatgaagttattggcgttattgcaaacaaatccgacgacccgggattcgccttcggccagcaaatcattgatccgggtgtgctgcgggttccggataaagagatggacttcggcattgtatttctcagcgacgtgcacatcgggtcgctcacctttctcgaagatgctttccagaggttcatcgactggataaattgcgagtacggaagcgaggagcagcgcagaattgcggaagacgtcaagtacctggtgatcgggggagacatcgtagacggtattggggtctatccaaaccaggacaaggagcttgccatcaaagacatcaccgagcagtacaacgaggccgctcgcttcctcgggaatattcggagtgacatcaagatcatcattgctcccggcaaccacgacgcctcccgggtcgcagaaccacaacccgctgtccccgaggagtacgcaaaggccctgtatgagctggacaacgtggaatttatatccaaccctggggtcgtgtctcttgacggcatcaacgtgctgatctaccacggccgaagcttcgacgatttggtaatggccgtgaaacagtttactcacgagcgcaatgacctgctgatggaggagttgttgaagaaaaggcatctagcccccatctatggagagagaacgcctctggcatcagagctggaagattatttggtcatcgacgaacttcccgatatattccacaccggtcatgtgcacattaatacatacaagaagttcaagggaatccacctcattaacagcggcaccttccagacccagacggaatttcagaaaatctacaatattgagccaacgcctgcccaggttccagtcatccacaagggcaaatataaacatctcaagttcatcgagtga

SEQ ID NO: 9948 - DNA, 501 bp, synthetic construct
  source 1..501: mol_type = other DNA
atggcgaacaagttcgtgcggattattctgatcgttgttctcttcgtgatcttttttgaggtaggcctcttcagtagctacactatcgtcactgccgaagcgccgaatatccaggggctgatcgacatgcagatccagaaaataagctccattctgaaccccgagaccgtgaacgaagccctgataaaagatcccacgccaatcaatattaccaataagaaggacgtggccctcaaaatgcaagacttgagcaaggtggacggcgtgaacgtcgattccatgaatatatctacacgcgacaacccttccaacgataagaacttcaccgtcatcatcgaagccctgggctatgcttcccctaatagtacatcagggcagattattatcagtcaggagccatcttacaagattatcgcttcggcacccgcaagctataggggagagggaataatggccgataccaacagcatgacaatcacgtcagtgcttaaactatactga

SEQ ID NO: 9949 - DNA, 1074 bp, synthetic construct
  source 1..1074: mol_type = other DNA
atgatttacgtcataggtatcgggcaaaaccgggaaaacatgaccctaggcgctttaaaggcgattgaagagtctgacgtcataatcggttataagaagtacatcgatcaaatcgaagacctggtgcaggacaaggaggtcataaaaaagggtatgggtgatgagatagctcgagctgagttcgcgatccagagaagcctgaatgggcagaatgtgagcttgatctccagcggagaccctggcgtcttcggaatggccaatgtactgtaccagatcgtctccaagtacgagggggtggaaataaaggtgtatcccggggtgtctgcactgaactacgcatcgtcccatctgggagcacctcttaacgacttcgccgcaatttcactgagtaacattcttactcccctgtcggagatcgaaaagaagctggaatacgccctcaaagctaacctcgtggtggccatttacaacccgatctccaaaacctgtaaggagcccttcaaaaggtttaagcagtgcgtttttaatatcaaaggcgaagacgccctgattggcatcgttgacagtacatacgagccgccaaaagccagcatcgtgaagatcaaggaactcaccgaagacatggtgaatatgtcttgcacactcattgtgggaaacgatctcacttatgttcaggatggaaaactggtaacaccccgtggatatgtcattaggtccaagattcacgagctatcacggaatcattacgagaagttccttaacggcgagatcgccaatggcccaaatagtgagtgcgagttttatccttgccactacgaaggccagtattgtgacttctgttattgccccttttacccctgcggggacagctcaaccggcggggagtggatcaaaggcaagaacgtgtggaactgtaaaaactgcatctggttgcacaacaaagaaagcatcgagtgccttcgcccacctttcgagaacattttagaggatattgaggatctgaaaagcaagaagaaaacgctgctgaagctcagacgcgcctgtctgttgaagaataacccaaacaatctctga

SEQ ID NO: 9950 - DNA, 603 bp, synthetic construct
  source 1..603: mol_type = other DNA
ttgtccatcaagaacctgctgatagagatgaagaatatgtcggaactgatggtggacctggcctactctgccgttctatttaacagtaaagacgcagcagaggaggtgattactctggagaatgaggtcaacagcatgaactatgaaatcaagaaggagagcctcgtcgcagcccgctcatacgaggacgcggaaaaactcaccgcattgctggaaattgctgaggctgccgaaagtatggcgaatgccgccaaggatctcgctgacctcgttatcactgggttcaagcctcacccggtattcaaaatggtgatggaggagtccgacaaaagcatagtgagagtcacaatcgacgagtcaagcgaactcgccaacaacaccctgggtgaccttctactcgtgaatcggacggggatgcgggtgattgcgattcgaaggggcgtgtcctggatctatggcccagataagaatacaatgctgctggccaacgatgtcctgatccttaaaggcacctacgaaggagccgaattactggaaaagctggctagcggagcttgcagccttgaagatatccccgaagagttggaggaggagttagagtga

SEQ ID NO: 9951 - DNA, 1272 bp, synthetic construct
  source 1..1272: mol_type = other DNA
gtgatatatgtgaagaagcaacagaagaagatccgctcctccctcagcacgcgaacattcagcgaatttttcagtgaacacgactacgtgataaaggagggcctcatcgctctcctcatctgcgccgtgggcgatcttatagccggtattgtcctgggcaagatgaccttcttcctggagagctttcccggcttgttggtggttattcctggagctatcggcatgaggggaaatatcttcggctccttcgcttcccggctgtctacctccctgcacattggcctgatcagcccccactttgagttttcagatgatttaaacaataacatcttttccagcttcgttcttacactggtgttatcgatatttcttgggattgtcgccaagattttctgcatcctcctacactaccactcaatggacctgattgactttatactcatttgcacaattgctggccttatctccaacctgataatgctaccaataactatgtttatttcgttcaaaagttttgaacacgggtgggacccagacaatattacaagtccgatcatcgcagccttcggggacctgttcaccctgcctgccatcatcgtcagcatcttcattttgaaatctctcaatttcaacctcatcgtcaaggatgtaatcctggccatcattcttatcgccgtgctcatgagctttattcattgttacaaactgtcttacgaaacgaagacgattctgcggcagtctaccccaatcctgctgctctgcagcttcttgggaggcagcgcaggcggaattttgaacagttcggtggaaaccttgctgagtaatcctagcctgctgaccctgatcccgctcttctccggtgagtccggcagtctgatcagtatcctcggggcgagaatatcaagcggtctgcatagcgggttaattgagcctctaagcaaacccgagggggagactatccataactttggaatctgttatatcctggcgatcgtgatattccccctcatcggcatcctggcagagacaagctccatctcattcggaaccatcggggtagggtttgacaaaatcatcctaatcagtggactttccggaatcattctggttaccgtcatggtcttcctggtgtactacatatcaacatcgtcatataacaataaccttgatccagataacattgtaattcccatctcaaccagcgtgactgacagcatttctagcttaatactgatttccatgagcctcttgatcctgggtactctgatttga

SEQ ID NO: 9952 - DNA, 867 bp, synthetic construct
  source 1..867: mol_type = other DNA
atggacaacactggcaacatgaccatagaaataacggtggtcctcctgatcgtcctgttgatcattagtgtgactattacctcctacgagaacatcaccgacaaactgatcaagacacaggaaaaggagaatatggaaatacttacctccgagattgtggataacttaatcaacaatcctggagtcccagagaagtggtttgagtacgggaagggcacacccgggcttgccattataaatgagggcggggaaattattcccaatagcgtgagctattccaagcttatctcgctgaaggaaaattacaagaagctggtggacgaccagctcttcaagagcaagttccattcatcaatggagctgatcccgcaaaagaggactattagcagtgtcaaaatcggttctaatagcgagtcgaataacatctttagcgtgaaccggttggtcaaatgcgatttttacaaaaagtacgtgctcaaggacttcaaaaacgatggaaaatgcaaccacaatcatgaccagaagtaccacagttgcaactatttcaagattttcaaaggcaatctcaaaaacagcgattactatctgctaatcgaggactccgagaagtatgacctgaagtatattgtggacaccacacgcgttgtgaaagaaaaatactgggagaatgcgatatcaaacaaaatctacctgaatgataagatcaacttttacgacgacacaagcgcaatcgtatttatccacttcaacaagccacagtctaaggtggtgctcgtatccgttcccaagaacttcgataaaaacaaactgaattacgattatttcatcacgaacgaatgtcagtttgttctaaaagtctggtattga

SEQ ID NO: 9953 - DNA, 939 bp, synthetic construct
  source 1..939: mol_type = other DNA
atgaagatcaactccaagggaaatttaatcgtcggaacgacagctattctcattatcgcgctgctctttatttgcatttttgtggtaacctctatcaattatattcaaaataaaaacatcggcatcgagagtaacgataacttcaaatatatcattgatgattacacccagaacctggagcttaactgccgcgacgccatcgatgaagccacccagaaggtgttcaacggcctccctgtgaccaacagtgagaaccagattaaaaagaacctgaataagatactcgacaaaaagaataaagagtacgaggaaaaatacgacgtgaagattaactccgaaacattgagcgtggaaaataccaagtcaccctggaagatcctttttaagattaagctcaacatcaagaagggggatgagaaatactccaagatcgttgagaagaacgcctccgttgaagggttaagagaccccctgccaatagctaaactcaccatcatgtcaggtattttgacttatgataatcagatccattacaaaactgcactgtccacatacatgctgctccaccatctggattcgcccgaaagctacatcgaggcgacagcccccctgtacatcaaaaaatgcccatatgacccttatatccaccacggcgaccctggcgtcatcgaggactgcctaaagcacggatatttccacgaaagcgcagacggcagttgttacctgtgtcggcttgaggggaagggaaaatgtccgcattacgggctggaagtgttcatacagactcacacgcccctaaaaaacgagtcactgtcttgcccggatcacgtggtcttcgccgaccactataacggtgagaagataaatccagacgactggaatagcctgattctggatagcagccataggaagaagtacgggttgataaatgacggctga

SEQ ID NO: 9954 - DNA, 399 bp, synthetic construct
  source 1..399: mol_type = other DNA
atgtcggacaccgtaagaacgtggagacacattcaacagcggtataatctcatcgggactaaatgtaacacctgcggtgaactgtttttccccagccgcgtggtgtgtcctaactgcaggcggaagggagatctggaacccttccagtttagtggaaaagggaagatttacacatacagcgtcattaggtccgcgccggatgatttcaagaaatcagcaccatatgccgttgctgtcatcgagctggaggaaggcgccaagcttacaagccagctagtcgactgcgacgttgatgacctcgagatcggggacgatgtggagatggtgtttcgaaagatacgcgaggacggcaaggacggcgtgatctcctacggctacaagttcaaagtgatcaaatga

SEQ ID NO: 9955 - DNA, 900 bp, synthetic construct
  source 1..900: mol_type = other DNA
atggataccaacagcaagctctcaaacaatgctggcgtgatcctcgtaagtcatggtagcacgctgccttttgccgaggaggtgttcaccgagatcaaagagaagttcatcaagaagtccgggctcgctaccgaaattggatacatgaaggtctctgaacccactatcgccggggccgtcgagatactaaaagagcaggtggacgatctggacaagattatcgcgcttccggtcttcctcgcccccggaatccatacaaatattgacattccacagctgctggggctggagcctttggaggtggacccacggtgccctgatggaaagtaccctgccgagcactatttgtcaatagctgacgatgtggattttgatggcgagattaggctcctgacgtccatcggaccccgggatgaacttctggacattatcgataaaaggatcaatgaagcattgtccgaaagtaagctggatgacagtgctaagacaggcattctccttgttacccacggttctagattacactacaacaaagaatttgccaccgaactgtatgacaaattcaaaaaaacatgtgacttaccctcgagcttcggcttcatggaactgtgcgggcccagcataccagaaagcattaacaagctcgcagacgagaaccgcctggaacgactggtcgttgtgccagtattcatcgcgccaggcatgcatacaactcacgatatcccccatatactgggctttctggatgaccacgaccataaccacgaggaccacgggcacgaccacactcacgacctcacccctgtggagtttgatggcgagatcctttaccccgagccgatcaagtccgacgacatcttgattgacatgctggtggcaatggtgaatgaggccctatga

SEQ ID NO: 9956 - DNA, 480 bp, synthetic construct
  source 1..480: mol_type = other DNA
atgtccgataaaaaaacaggaattttactcctgagccatggctcgaggctggaggaaggtaagaaagtcattgaggcctacaagaatatgtacctggaggaatttccagaggccatcgtcgattatgcattcatggaaatccggaagccgggcatcccagaaacgatcaagaaactcaccaccgaaaacgatctcgagaagataattgtggtgcccgtatttgtggctcatggactgcatactaagcgcgacatccccgacttgctggggatcgaatccgacttcgacattgaagaagtgagctgccaccatcacgatcacggccacagtcacggccatcaccaccaccaccacgaacacagccatgaggaggaggaggaggagttcgagttcgacggggagataatcctgaccgatcctctaggggtggacaagcgaatgtacgagatcattaaagacagagtttcagagcatctttga

SEQ ID NO: 9957 - DNA, 426 bp, synthetic construct
  source 1..426: mol_type = other DNA
gtgattggccgacagacaatcaacatcaataagagccgggagctcgaagagctctaccagatcatggagaaaaagtgggacaaggagaagtataataccttctttctaggcaagccaaaccccctctccatagaaaagtacatctgcctgcccgccacacagcgctacatgatcattgcttatcctagaaagggtgggaagttcttctcgcgcaacgataaagtggtcttaaccatctgtgatactccggacagcatgaagaatcaaatagtaacctcactggccagggacaacatttttaaactgacataccagattagtgaatccaaaagcaggaacgaggagcggaaagggccaaccgaggaaacgctgcagggatatactgcatacatgaaacaaatccttgaagaggaggacttgctgtga

SEQ ID NO: 9958 - DNA, 1026 bp, synthetic construct
  source 1..1026: mol_type = other DNA
atgctgttcatcctcctggattacatgatcctatttttaagacagctcaaatttatacagcgccaaaacctgtttatcttgaaggttatcctaatatttatgtccctcaaggtcagcgatattggcgaaaaagagctggtgcggtacattatagctaattccaagaagattactccggacgacgcggcaatcacgccattctacaactctaaccttatttcaacctgtgacatgcttatccagtcacgacactttccaaaaaacatgagctattacgatatgggcttcaagagcgtcacagttaacgtgagtgacctggctgccatgggcgcaaaacccctcggatttcttctcagcatggccatccccaagaatttggaggtggacaatttcaaggaaattgtagggggagtgctgaaggcttgcgattattactccatccctctcatcggcggggataccaacgaggcatccgaaatcatcatcagcggaacagcgctggggttgtgcgataatcccctgatgaaaaacaattacaaaaaggatgacctgatagccattaccggagacatcggcctggccgccctggggttcgagatagacgacctcgatagcatctatgtgaagcatgccctaaggccaaaagcgcggatcaatgaggggcagatcttaaagaaatacggtgccacctctgctacggacattactgacggactggcaagtgaactctacgagattaagaaagacggcttcggcttcatgattcatgaagagctgctgggcatcacagacgaatataagaacctggccagtaaccttaacttggattacctcgacctggtcttccacatcggtgaggatttcgaactgctgtttaccatatcaaaggagaacttggagaagctccctatcgagtacaaggtgattggaatcgtatcggattccgacgtgattgaacttactctggagaatgggttcgtcgaacagattaaaaataaaggctatgagcactatgtgggtgagtga

SEQ ID NO: 9959 - DNA, 873 bp, synthetic construct
  source 1..873: mol_type = other DNA
atgctagtgagtaacgacctgtataaaaagtcgtctaagacacagaagatcaggtgcgagatctgtgctaactactgtaagatcgatgagggcaatgttggtatctgtcatcagcacaaaaacattaatggcgagctattcgacgaaagctacggcattgtttcaagcctcagtcccgatcccattgagaagaaaccactgaacaagtttctgccccacacgtcaacatactcaattggagggttcgggtgcaatatgagttgcctgcactgccagaactatataatctcccacgaatatgggaactactccagaggcatcaagataaccccagaggagattgtggaaaacgcaatcaactacaattgcaagagcattgcctggacatacaatgaacctaccatccacttgctcttcaaccgcaagacttctctgcttgctaaacagaagaacctcaaagtgatatatgtaagcaatggatacttcagcgagaagtctcttgaggaggtgctgtgctttgtcgacgccttcaacatcgatctgaaatccatgtccagcaacttctacaagaaggtctgtggtgccgatctggacatcgtgctggataatctgaagcggatttacttcgaaaacaaacatctggagatcaccaatcttataatcaatgagtttaacgactcgatcgacgagattacccaattgtgcgacttcgtggtcaatgagctcgggccggaagtccccctccattttagccgagcgtttccttattataaaatgaatgacatttccccaactaacaccgaaacgttgtttaaggcaaaagaaatagccttaaaaaagggaatccagaacgtgtacctcggcaacatctga

SEQ ID NO: 9960 - DNA, 1254 bp, synthetic construct
  source 1..1254: mol_type = other DNA
atgatactgaaggataaaaacattatagagattaccgaggaactgtcaagtgagtttgaggtagccaaagttttgagaaaatatccaaaggacaccgtgctcattaagaatgtcaagggtttcgacattccagtgatctccggcatatgtaacaccagggataaaatcgccaaatccatcaactgcgaagtgagcgagattacggaaaaaattatcgaggctatggaaaacccaattaaggtcgacaagtttacggatttctcggattacgatagcctggatatcgatctgaataaaattcctattctgacccactacacacgcgatggcggagcgtacatcactgccggtgttgtctttgcacgcgatccggtaactggcatccaaaatgcatcaatccaccggatgatggtccttgacaacaagcgactcgtgatcaggatcgtgcccagaaacctctatacgtacttccagaatgcccagaaggccggcgaagacttgcagattgctatagctatcggaatggaccctgctattctccttgctagtaccacaagcatcccgattgactacaacgagatggacgtggcaaatgcctttaagaacggggagttagagctgatcaagtgcggagagctagaagtgccccaggcggacatcatcttggaggggaagatttccgtgacagagacgatcgctgagggcccattcgtcgatctgactgacacttatgatatcatccgggaccagcccataatcaacctggaaaaaatgcacatcaagaaggacgccgcctaccatgcaatcctgcccgcgggatttgagcacaagctgctccaggggcttccccaagaacctcggatattcaaagctgtgaagaatgccgtacctaccgtggaaaacgttgtgctgaccgaagggggttgctgctggttacattccgtggtttcaattgacaagcagacagagggcgacggcaagaacgccatcatggcggccctgagcgcacatcccagcctgaagcactgtgtggtcgtggacaccgacgtgaatgtcttcgatgccgaggatgttgaatatgccatagccacccgagtcaaaggggacagagacatcatgatcgtgcctaatgtgcgcggctctagcctcgatccagtcgctaagagcgacgggacaaccactaaaatcggagtagacgcaacaaaatccattaaaacactagagaagttcgaaagggtgagtttcagcgagtga

SEQ ID NO: 9961 - DNA, 1026 bp, synthetic construct
  source 1..1026: mol_type = other DNA
atgacaccaaagatcatgatcattctgggtagcggctcggatatcgctatcgccgagaagtctatgaagatattggagaaactggagatcccatacagtctgaagatcgcttctgcccaccgcaccccggacctggtccgggagattgttatccagggcactaatgcgggcatcgaggtgttcattgggatagccggtcttgccgcacacctacccggggccattgctgcctatacacctaggccagtgatcggggtcccagtagacgtgaagacaggaggggtggatgcattggaatccatcgtccaaatgccttatccttcccccattgctactgtcggaattgatcgcggcgacaatgccgcaatcctggccgcccaatttattggcctccacgatgacgaaatacgtcagaaaataatcaacttgagaaaaaattacgccctgaaggttaaaaacagcaacgaggagatcatccagaagattgaagacaagaagttcctccagaatgattttttaagaatcaaagacctaaatatcaatgacatcgaggcggatgagagtgacccatgctgtaagaacaagaacgctgatgtggcaatcatcgttggacggcagactgatgtggtaaccgcgaaaaaggtcgccgtgatcctggaccgacttaaaatcagccatgacacaaaggtggtgtgccccattaggtccaccaaaaaattcaccaactacgttaaggcaatgaaaaacgctaagatattcatcgggatcagctccaacagctctcaggtcacgggtggaattgtgggcctcacggaccggccggtaatcggcgtgccctgcacgaacgaaaacggcgacgattacatgctgaccacagtgagtatgccccccggtgtgcctgtggcaaccgtcgggataaacaacggaaaaaatgcggccgtcctggctggagaaattctgtcaattaataacccttcaattaccgaacttctcggcaaaataaagaacaagaagattaatctctga

SEQ ID NO: 9962 - DNA, 2190 bp, synthetic construct
  source 1..2190: mol_type = other DNA
ttgaaaataacactgatctacctgatcaaactgcgggagaaaatgatagctaagacactcgagaaggaattgaacctatcaaattggcaagtgaaaaaggtaataaagttaattgacgacggaaataccattcccttcattgccagatacaggaaggacgttactgggagcctgaatgatgctacactgaggaaatttgacgagcggctgaagtacctgaggaacttagaggaaaagaaagagaagatcatcaaacggatcaacgaacttggaaagcttgatgataacctcaaaaataagattcagaactccaagactctggtggaacttgaggatctgtaccgcccatacaagagtaagaaacagaccagggcaacaaaggctcgtgagaagggtctggaatctctggcatccatcatccttaaacaagaaatcaaggaaaatgtgaaaaatatcgccaaaaactacatcaccgacgaggtgaaaacactagaagaggctatccagggggcgcaggacatcattgccgaggagatttcgaacaatagcgagtttcgaaaaaagattcgaaagaacaatttctacaccgggcagattgaaaccaagacgaaaaataaggatgaatcgacggagtacgacctttattatgactacgccgaaaacatcaagaagatccccccccacagaatcttggcaatcaacagggcggagaaggagggaataattaaagtcaagatcaactgcgacaacgaggagataatcaaatatctaaatagacacgtgttgaagaacatctcgggcatccctgaaaagatcgagtataacccctatacaacccagattatcaaggagagcgttgaggacgcatacacccgcctgatttccccggccattgagagagagattcgaaactacctgactaagaaagcagaagaaaaatcaatcgaagtgttcgctaaaaacctcaaccagctgcttatggagagccccctggtgggcaaaaccatactcggctgggacccggctttccgcactggttgtaagctggccatcatagacaaaactgggaaagtgctggataccgagctgatctatccaacccagcctcagaacaaggttaccgaaagcatcaagacggtgaaggatttgatcgacaaatacagcattgatgtcatagccattggcaatgggactgcgtcccgagagtcagaggagatcgtggctaagatcatcaagaacaccaacgtggaatacatcatagtcaatgaggccggggcctccgtgtactccgccagcaagtacgccgacgaggaatttcctgacttctcagagggtgaacgcagcgccatctccatcgcccggcgcctgcaagatccactggccgaactggtcaagattgacccaaaaagcattggtgttggccagtatcagcacgacatgaatcaaaaacagctcaacgagacactgactggcgtggtggaaaaggtagtgaacgaggtcggagtagacctcaacactgcatctgtcagtctgctgaactatgtctctggcattggaaacacgaccgctaagaatatcattaactacagggaagagaatggaagtttcgacagcagaaaagagctcttaaaagttaagaaactggggaaaaagacatatgaacaatgcgctggctttattaaggtcaataaccccaagtaccccctcgataacacgaccatccaccccgagagctatgatgccgcgtacaagctacttgagaagctcaactatagcatcgatgatatcggcagttcaaatttaaagctcgacaacattaatctggaagagatctccgtcgagttggacatcggtcaggaaacactcaaagacatcattaaggagctccgcaaacctgggcgtgatcctcgggacgacatgccaaagccaatgctgcgcaagaatgtattgtccattgaagatctggagataggcatgataatgcagggaaccatccggaatattgtggacttcggcgcatttgttgatatcggcgttcaccaggatggactcgtgcatattagccagctcgtcgagaacaaattcgtaaagcatccgctggatatcgtgagtgtggggaatattgtggacgtcaaggtgctggacgtggatttgaagcggaatagaattaacctcagtatgatactttga

SEQ ID NO: 9963 - DNA, 1698 bp, synthetic construct
  source 1..1698: mol_type = other DNA
atgtactggtttttcgtcatcctgtccttcttgcttgcaggcataaaaactcagaagcctaacaagtacaagaaggtgagcgtgatcatcccagcctacaatgaggaagagactgtggccaaggttgtcaacgtcgtgaagaaagtatccttcgttgacgagatcatagttgttaacgacggctcaagcgataacacggagatggaggctctcaaggctggcgcgatcgtgatcaaccacgaggtgaataagggaaaaggcgaagctttgcagaccggctacagggaggcagagtgcgacatcatcgcatttattgatgccgacatctacaatctgacctccagtaaagtggagagtatgatcaagcccattttggacgggggagctgatatcactaaaaccaagttctctcgagccagcggccgggtgaccgagctgactgcgaagcctctgctgaacttcttcttccccgaaattagcttcgagcagccgctcagcgggcagttcgccgcccgtaaggaggtactaaagaagatcaacttcgaaagcgattacggtgtcgatgttggtatcgttatcgacgccgatgtcctgggaatcagcattatggaagtggacattggagctatcgaacacgacatgtctccactgagcgatttgaatttgatggcaaatgaagtggtaagaactattataggtcgcgccaataagtacggacgggtgacaatgatcgacgatatcgggtattacattcgcatgtcgatcgtgggtctgtcgctggtcattcttgggctgtttaccatattctttgtaaagtttgtgcctctggccattggcgtgataatttcaatcataggactgctcatcgccatcttctatatctttaaagtcatcattaaatcaatagtcatgttcaagaagacacccggccgcaatctgctcaaatccttcgtgaaaattcacttcccaatgattatttcaataattatactccttcttatgatcagcacatttctcggggccgcacacttcgaccatggcgtgctgtcaatcgagcccaatagccgaaacctaattatttatgccgatgactcgccaagggatactatctccgtgagaggaccctacacgattgacaccgcaatcgagaatgagtctgggcagatacggatgcccagcgatgctatgatgacactgggcgtcaatatcaatgacacgatcaagcttggcgcgaatacctataaagtcaacgaaaccagattaggggagcctgacattctcaggctgccgattgaggttaaaaagctactccaggtggaaaatggtgaagtgatccaaaacagtcggctcaaagatgtgtttgacggcagcctgatcactcacgcttatgaatataataacacaaccatcaaagagaaatacttcattacaagtaacgaaaaacaaagctccacatacgagatatttctggataacgaatccatcgtgaacagttatggcacgttcaaggacaacggaacgtacgacatctctgtagacgggaactatctcaccagcttcagttacaagaacaacctgaccaaatcatttaagttcgacgggcatgatctggagattgtctttcgcgacacaaactccacctccatcaagcagttttccagtggaaaccagggtgtgttcttaaattttaacttttga

SEQ ID NO: 9964 - DNA, 936 bp, synthetic construct
  source 1..936: mol_type = other DNA
atggaaatcctgaaacctaacgagctccgggagcgcttcaacgacccatggattgcaccatacaagaaagtcttgaccatggtggacggcaacaaggtcgagatcgtcgaataccacccctgcatatccggttcccactggttgttaaatcagtacctgaacaattccgagttgatcgatagcgcttatcgagacggtaacaaacatgtgtataagtgccacgtggggaaagctcccctagacctgaaagcaagctttaacgcagcgggcatcgacgagatcgtggtggctgatgatgaggttaaagtaacccacagcggactcgccggcgccggtgttggagctggaatgtgcagaggcatgggggaaggggtcaagtatattgaactcatacaagttggaggcgggtcaaaggccggaaaagccaccgtcgtaactcccaagcttaacaagatcgtaatcggtgtggatgacactgacgtgaaagatgccggagctacttggacgatggctcacaatttaggggtggagctagccaatgaggggttcgagtacctggatcatatcattgtccagctgtaccctcataatccccacaagacacagaactgtgtcagcatcgccctcacattcgctgtggaggagtctaaaaaggaaaagctgatagacagggttattgaaattctgaagagggacacactctcggacaaaaccgcaattgccatcctggaggggctggatatcccggaaaagctgcggaagtacagtatcgccacaaagagtggcatgatggacatcgagaccgcagaatcacttgccaaggaactgaacataccactgattgccgtgacgggcgagcagggcaaggtgggcgcgctcgcggcgctgggcctttacgatgacgtggaagaggcagtgaaagcctatgataagtga

SEQ ID NO: 9965 - DNA, 423 bp, synthetic construct
  source 1..423: mol_type = other DNA
atggccaagtacgagatcgccgcagtggtggccgaatttaactacgacattacgcaaatgatgttagagctcgcaaaagccgaggccaaaaaccggggatgcgagatcacaaaggtaatcgccgttcctggggtcttcgacatgccgctgatcataaagaagctcctaaaatccgaaaagtacgatgcaattgtcaccttgggcgctgtgatagagggcgcgaccgatcacgaccagatcgtcgcccagcatgctagccggaagattgctgatcttgcgctcgagtatgatacaccagtggccctggggattactggccccggaatgaccaggctggacgctcacagacgagtgaaaaatgcaaagagcgccgtggaagcggctatcaaaatgtgtgaccgcctgagtgagctggacgaatga

SEQ ID NO: 9966 - DNA, 102 bp, synthetic construct
  source 1..102: mol_type = other DNA
atggactttaaaaagctgaccaagatacagtttgccgcactgttcatcattttcatcatggtgctgagcggcgtcgcggggttcctactctacattatctga

SEQ ID NO: 9967 - DNA, 1008 bp, synthetic construct
  source 1..1008: mol_type = other DNA
ttgaacaccagcaagaccaaagacaagtacaagattgctgttattccaggcgatggcataggcaatgaggtcatggaagcggctatctacgttttaaatgccctgaacatcaactttgattacgtgtatggcgaagccggtgacgagtgtctcgaaaagaacggcacggcgttgcccgacgaaacacttgacatcattcgtaattctgacgcttgcctgttcggcgcagcaggggagacagccgcagacgtcattgtgaaaatacgacaggagatgaaaatgttcgctaacctcaggcctgtgaaatcataccccaacaccaattccttgtcggataacatcgatttcatgatcgtgcgggaaaacaccgaaggactctacattgcaggggaagagagttatactgacgagggcgcagtcgctaggcgcatcatcacgcgggaggccgagaagcgcattattgagtacgccttcaaatacgccaaggagaacaacaaaagcaaggtgactggtgtgcacaaagccaatgtactcaagaagagtgatgggctgttcaaggatgtattctatgaggtggcgaaacggtatcctgaaatcgcaacagaggactactatgtggacgcaacagccatgtatctgattaccaagcccgaaagctttgatgtgatcgtcaccacaaacctttttggagacatcctctccgatgagggggctggcctcgtcgggggactggggttaatcccctccgccaatatcggcgaagacgctgcactatttgaaccggtgcatggaagcgccccagacatcgccggtcagggaaaggccaacccaatagccatgatgctgtcagctatcatgatgctgagataccttggggagaacgaggcggcgaatagattcgacggagccatactgaaggttctgaacgaggccgacattctgactggtgatctgggaggctctgccaccacgatggaactagctgaggaggtgaaaaataatctgtga

SEQ ID NO: 9968 - DNA, 480 bp, synthetic construct
  source 1..480: mol_type = other DNA
atgaaaggaacggcctggaagttcggaaacgacattgataccgacattatcgtaccgggccgatatctgatctacaccaatgaagagcggctgtcacagcattgtatggaagggctcgaccccgatttcaacaagaagtgcaagaaaggcgattttatcgtggcaggaacaaactttggatgcggcagctccagagagcacgcccccatagcccttaaaggtgcgggcgtcagtgcagtgattgctgagagctttgcccggattttctaccgcaatgctacaaatattggcatccccctgctcgaggcgccagggatcaacaagctgatcgaagacggggaggagatcgagattgacatgaacaaagccactatcaaatcccaaaatggtgagataatcagcttcaagaagctacctccattcatgttggaaatcctggagcagggcgggttaatagaatacctcaagaacaagaggtga

SEQ ID NO: 9969 - DNA, 1245 bp, synthetic construct
  source 1..1245: mol_type = other DNA
atgcccacaatgtcagagaagatacttgccaaggcgtccggcaaagaaaaggttgaagccggcgatatagtgatcgcaaatatcgacgttgcgatgacccacgatttgacggggcctctgagcgtggagtccttcgaaaagattggagccgagaacgtgtgggacgccagcaagatcgtgatccctttcgaccaccaagttcccgccgatagcatcgactccgccaataaccatatcataatgcgcgagttcgtgaaaaagtacaatattgagaatttttacgacgtgaacgctggcgtgtgtcaccagattctacccgagaagggtcacgtggtccccggagaagtgatcgtcggggctgacagtcacacctgtacacatggcgccttgggcgcattcagcacagggatcggctcgactgatatggcaatggtcttcgcggagggcaacctttggctgaaggttcctgaaacaaatcgattcaacatcacaggagatctcaaggaaaacgtgtatgccaaagatgtcatcttgcacatcatcggggagatgggtgctgacgggtcaacctacaaggcctgcgaatttgccggtgagactatatcaaatatgagtatcagcgacagaatggtgctttgcaacatggcaattgaaatgggcggcaagaccgggctggtggagccggacaaaaaaaccattgattatgtggagaagcattccaacaagccttacgagattttcaaaacggacctcgactcctcctcgctaaacatgattgacatcgatgtgagcaacctcgagcctcagatagcctgcccccataacgtggataacgtcaagccaattagcgaagtcgaccaagagatcgaccaggtctttctggggtcttgcactaatgggaggctgagtgatttaagggacgctgccaagatactgaaaggcaagaaagtagctaaagacaccagaatgctcgttatccccgccagccaggagatctatctgaaagcactggacgaagggctgctgaagatctttgtggaggctggtgcactggtcagcgccccatgttgtggcccatgcctcggcggacacaccggaattattggaccagatgaagtaagtctcagcacgtccaatcggaacttccgcggacggcagggtagcccggatggaaaagtatttctgtcttctgctgctgtggccgctgcgtcagcaattgagggcaagatcgtcagtccagagtga

SEQ ID NO: 9970 - DNA, 1209 bp, synthetic construct
  source 1..1209: mol_type = other DNA
atgagtaactcaatttttaagcggttcaaaaaaaaagagacccctataatcgaggagaagcttcccattctcgaggaccgcatcttctgggtatccacgttacagaagatcgcttttccggtactcaataatctcgcacgggattcgctgagtaaaaacatgcccgtggaatcaattagcgccgaaggtcactcgagcgcttatttcgatgcctttgtcagaatattcaatggaatcgcctcctggctggaactgggcgcggacaacagcgaggaagggaagattcgggagaagtacatttatcttaccctgaaagctatcagcaatgccatcaatccaaaaagcaatgattacatcttcgtggttgaacctaagcagtccctggtggatgtggcgttatttgccgagggattgctcagagccaagaaccaaatttggctaaacctgcccattaaggtccaggcgcggatcatcagagacctgaagagtacacgaatcatcgccccatacgagaaccactggctcctctacacgagcatgatcgaagctgccctgctcgagtttaccggggaatgcgataaagaacggttggtgtacggggtccgtaaatttcgagacgaactgtacatcggagacgcaatgtacagcgatggcgaggacttcgagcttggctactataacagcctgtttatccatcccatgctcaacgacatcctaggcgtcatgagaaaatatggcttggaggacggtgagttcctggatgtgcaactgatgcgcagctcccgcctggcatctcagctggaacgcgtgatctcccccgagggcacttatccactcctgggaaagttcctgtcttataggtgtggggttttccatttgatgtctcaggcctcccttctgaaaatattgccaaagaacattcacccggctcaagtgaggtccgcccttacaaaggtgctaaagactcagtttgagtcctacaataacttcaattcaaacggatggctgattattggcctggagggcagccagaccgacatttcagacgaaaccacaaatacaggtactctttactcatgctgcagcatattcctgccattagggctcgacaggaacgacatgttctggaaggcaccttctgctgagtggagtagtctgaaggcatggaacgggcaccccatacagagggatcagcctatcaacttttga

SEQ ID NO: 9971 - DNA, 1239 bp, synthetic construct
  source 1..1239: mol_type = other DNA
atgaaagtgtgcatcatcgggcaggggtatatcggcctgcccaccgccgccctgttctccaagaaccattgcaaagttgtgggagtcgacatctctgagaaaatcatcaataacttaaacaagggcattgtgcacattgaagagcccggaatcggggacctaattaagaacgccgtggaaaagaaaagctactcagcctcactcacgccgcagaaggctgacgcattcattattacagtgccaaccccatacatcgcggagaattatagttgcgacctaagttacgttatcgacgcctgtcactcaatactgccctacttggagaaaggcaatatcgtgattattgagtccacagtggcccccatgagcactgacgaacaaataaagcccatattcgaggaggccggtttttccatcggcaaggacctctaccttgctcattgtcctgaacgcgtgctccccggcaagattatgtacgagctggtcaacaataaccggattattggcggcgtgaccgaagaatgtgctaaaaaggctagtgaagtttacggagagtttgtcgaaggtgaactgatactgactgaggccaagacagccgagttaagcaagtgcatggaaaatacgttccgggatgtaaatatcgccttggcgaatgagcttaccaagatctgtgctgagatcggcgtcaatgcacttgatgtaatcgagatggcaaacaaacacccaagagtcaacctgcattccccgggaccaggggtcggcggacactgcctggcaatcgatccttacttcatttatgccaaagcgcctgagaccgccaagattatcaaactggcaagggataccaacaactccatgcccgattttgtatgcgataacattaggaagatcatcaaaaagggtaagatcgctgtgctcggggtgtcttataaaggaaatactgacgatgatcgagagagcccggcttatgaaattatagataagctctcgaacgactacgagatccagattcacgaccctcacgtggaaaaccctaactacgtcaacttcgacatcgcagtgaaggacagcgacctgatcttggtgctctgcgaccataacgagtttaaggatctggactacaatctgataaagaagagcatgaaaaaccccgtcatcttcgatacaaaaaatataatcaaggaagttccatctgagattaaactgtataattacgggaacctctatgagctgaactga

SEQ ID NO: 9972 - DNA, 840 bp, synthetic construct
  source 1..840: mol_type = other DNA
atgaagatcctgataactgggtcgaacgggatgctggggtatgacttgcaggaggttctcaggcggactcacgagctcatcctgacaacttctgagacattagatatcacggacaagaaacataccatggagttcatttccaacaagaagccggacatcgtgataaatagtgcagcctataccgacgtggatggttgtgaggaaaaccaggatattgcttatacggtcaacagcgagggagtgaagaacctggctatcgcatgcaaggagatcgactgccctctcgtccacatcagtaccgattacgtgttcaatggtaagagcgacaagccatggattgaggaggacaatgtcgatcccatatccgtgtatggcaaaagcaagcttaggggagaaaaatatatccttgaaatcctagacaagttctttattgtacgcacagcctggctgtacgggattaacggccgaaatttccccaaaaccatactcgaactggccaaaaatcattctgagatcaccgttgtctacgacgaaatcggcacacctacatacacgcaagacctggctaaggcgatcagcgaactgataaaaactgatttctatggcatttaccacctaaccaactccggcagttgcagctggtgtgagtttgcaagatacatctttgaggtggccaacgtggatgtcaaggtgatcccagtgaccgccagcgaatttgcccgctccgcgtcaagaccaaactactcagtattgaagaataaaaactggattaaaaacggattcaatcccctccggaattacaaggaagccattaaagaatacattgagctgatcatctga

SEQ ID NO: 9973 - DNA, 450 bp, synthetic construct
  source 1..450: mol_type = other DNA
atgaacaaaaaactgattcttataattgcaagcatcgtcgccttgtttagcatcgcctcggtctccgcgggcttttttgatttcctgcattgggacgacgacagcgacaatatcaacgtagtggaggatggccaatattgcacagtgaaccaggtgtcagcctatattaaggagttccataaactcccatccaactatatcaccaagaaggaggctcagagcctcgggtggcacggcgggcctctgaagaagtacgcaccggggaaaagcatcggaggagacaccttcacgaacaggcagcacattctacccgatagtgattacaagtacatcgaatgtgacataaatgctaatggaaccttccggggtgccgaacgcatcgtgtacaataccggcaactataaggtgtactacactgacgatcactacaacacattcactgaggtttga

SEQ ID NO: 9974 - DNA, 231 bp, synthetic construct
  source 1..231: mol_type = other DNA
atgctcatagatggcaaattgattaagacagaggggcacgactatctgataaaaatcttaaacctgcccgactactacggaaaaaatctggatgccctttacgactgtctgtgcgaaatggactgcgaaattcagctcattaatccaaagtatgtgaacaaggacatcatcgataccttcctggatgcaagcatcgagaacgagtttctaaagttcgagatcctctactga

SEQ ID NO: 9975 - DNA, 867 bp, synthetic construct
  source 1..867: mol_type = other DNA
atgaagggcatagtgctggcaggggggtccggaacccgcctttatcccatcacaaaagctgtgtcgaagcagcttttgccgttatacgacaaaccaatgatttactacccgatatccgtactgatgcttgcaggaattaaggagatcttgattatctcaacccctcgggatctgccaatgtacaaagacctgctaggctccggcgccagtttcggcatcaaattgagctacgccattcaagagaaccccaacggccttgcagaggcgttcataataggtgaagacttcatcggaaacgataacgttgccctcatcctcggcgacaatattttccatgggcaccgcttcaccgaaatcctggagagagcaacgaaactggacgaaggtgcgattatcttcggttattacacgaacaatcccgaggcctttggggtggtcgaatttgatgacaattggaacgtcctgagcgtggaggagaaaccaaaaaaccctaaaagcaattatattgttcccgggctgtatttctatgacaacgatgtgatcgagatcgccaaaaacgtgaagccttctgaccggggagaggtggagatcaccagtgtcaatggggagtacttaaagaggggaaagctgaaggtcgaactcctcggccgagggatggcttggctcgataccggaactcacgaaggcctgctggaagctgccaactttatcgagacaattcagaagaggcagggcctgtacatcgcctgcctggaagagattgcctacctcaagggctacatcaataagaagcagttgctgaagactgcggaggaactaaagaagacagattatggtcagtatctgtttaatctcgctaagatgtga

SEQ ID NO: 9976 - DNA, 561 bp, synthetic construct
  source 1..561: mol_type = other DNA
atgggcaagttcaactttatcgagacggggatcgaggagatgtttgttgttgagcccgcaatcttcgaagataatcggggatatttcatggaaacatacaacgagaaagatttcaaggacgcgggacatgacctgaccttcgtgcaggacaatcagtcaaaaagcaggaaaggggtgctgcgcggcctccacctacaggtgaaatatcctcaaggcaagttagtgcgagtgatcaatggggaggtctttgacgtgggcgtagacctcagagccaactcccccacttacggtaaatggttcgggaccatcctcagcgacaagaacaaaaagcagttgttcatcccgccaaagtttgctcacggattccttgtcctgtccgacgaagccgaatttgtctataaatgcacagaattttaccacggtgaggacgaaagtggaatcaagtgggacgatgaggatatagccattgactggccactgaacgacattgatgagataattctgtcggataaggataagaaatggctgggcttcaaggagagccagattaagtacaagtga

SEQ ID NO: 9977 - DNA, 1008 bp, synthetic construct
  source 1..1008: mol_type = other DNA
atgtcaaagatacttgttactggcggagcaggattcattggaagtaattttgtccgctacatggtgaacaagtactccgaatatgaaattgtgaacctcgacgctcttacctactgcggaaacctcgagaatttaaaggacatcgaaaagaacgacaactatagcttcgtcaagggcgacatcagagacaagaacatcgtcgatgacctggtgcagcaatgtgactacgtgattaatttcgcagccgaatcccacgtagacaggtcaataaccgacccagagatatttatcaagagcaacgttcttggcacacaggtgctactgaacgccgcgaaaaagtacggtgtggataaatacatccaaatttcaactgatgaggtatacgggacgctgggaaaaacaggctatttcaaggaaaatacccccttacagcctaatagcccctactcggcgtccaaggctgggggagatctgatcacgcgggcctacagtgagacctttgatctgccgataaatatcacacggtgcagcaataactatggcccttatcagttcccagagaagctcattcccctaatgatcagcaatgctctggaggacaagaaactgcccgtgtacggtgacgggaaaaacatcagggattggctgcacgtttacgatcactgccgagccattgatctggtgttgcatgagggtaaactgggggaagtgtataacatcggtggcaacaacgagaagcagaacctggagatcgtcaaactcatcctcaatcagctcaataaggatgaaagcctgatcaaatttgtgaaggaccgtttggggcatgatcgccggtacgccatcgacagcaacaaaattcaggaggagttgggctggtccccaaagtacacattcgagatcgggattaaagaaaccattcaatggtatctggacaaccaggagtggacttccaaggtcaaaagtggccagtacaaagactattataataagatgtactctggcagatga

SEQ ID NO: 9978 - DNA, 318 bp, synthetic construct
  source 1..318: mol_type = other DNA
atgattattgtgtacggcaaatatagcatatatctgctcggaggaatggaaatgcttgagcagtacctgccctttgtggggctgataatcttcggaaacattgagaaccttgtactgagcagccaaggggtcgtggcaggcgtcaatccagttaagctcgggatcgtgtccatcctatttgtgatgggctggttattcatcgggacagttggtacctcaatgctgatgcagtacgtcgacttcatcgatttcatcggaggtctggccatctttatcttgggcctccaggcgatggtggaaagtattcggggcgtgtga

SEQ ID NO: 9979 - DNA, 279 bp, synthetic construct
  source 1..279: mol_type = other DNA
atgaaggaactaaaaccatttctggcactgttggtctttggcaacattgagaacctgatcctggccgcgcagggcgtggccgctcatgtagacccgattatcctcagtatcttaagcctgatcgcagtggtgtgctggcttctgatcgggacgttcggaaccaagctggccatgaaatacagccggtatattaatttcattggcggtttcgccatctttatactcgggatacaggctatgatcgagtccctccccggaatgcttacattcttccactga

SEQ ID NO: 9980 - DNA, 1080 bp, synthetic construct
  source 1..1080: mol_type = other DNA
atgagatattttaaacaccgcatctatggcgcactgttcaagcttttcaaagacaccatcatcaagaagaaccgggtgtccttcatcgtcgactcaaaggaaagcttcaagggcaatctggattacatccagaaggagttcgaaaacagaggaaacttcgagtttcattacttctacaagaacaaacttagcataggcagcttccggaagttgagctccagcaaatttatatttttgaacgacaacttttttccactcgcattcatggaatttcaccccgagaccacaattgttcagctgtggcacgctccaggggcctctaagaaatttggggggagcgtggacattcaaaacagggaaatcctggagaaaatttccaaaaatactgactacttgattactacgagcgtcaatatcaaggattattactccgaggccttccaaatgcctttaaacaagattaaatcactcggtatcccgcggatcgactattacttcgaaaatcatgacgtcaataccctgaagtccaatttccttaataaatataacatctcaagcaataagaagatactgctctatgctccaacatttagggatgaggaaaaatacaataacgtattcaactacctcaacctggaggagttcaacgagaatcttggtgacgaatacattctggcgctgcgcctgcaccccaaaatcgagaacttctacaagaacgacatttcggacaatggaaactacatcgacgtgagcgactatgaaagtgagcaggaactcatgctgatcagtgatatactcataacggattattcctctatcatgatcgaatttgccaccctgaataagcctataatcttcttcacatacgacttagatagttacctgtccaacgagcgtggcttctattacgattttaaaaaaactgtgcccggccccattgttcacacatcacaggagttgatcgatgtgattaaaaagaacgagtttgataagagtaagatttcggagttcctgaacacccagtttgacctaatcgatggagatagtagcaagcgaattgtggactttctactcaagtga

SEQ ID NO: 9981 - DNA, 960 bp, synthetic construct
  source 1..960: mol_type = other DNA
atggacaacattaatgtcagcgtcatcgtgccagtatacaataactgtgagtatatagagtccacactcagttcaattatcaaccaaaatttcgacaacttcgagattatcgtgatcgacgatggatcgacagacaacagtctggaaattgttaaagagaagctcagcgcttcagatattagctacctgatcatccatcaggagaacgccggagtcagctgcgcgaggaaccggggaattgaggtggcttgtggtgattatctggtgtttgtggatgccgacgactacatcagccagaaccacctgtccgaactgtacaacggggagactgatttcagtctcattcagctggttaagagggaggggaatgacctaagcatcccttatcatttctccgaaagttcaatctcctgcaacgactttattaaaatggagcttaacatggaaatcccctttaacttctgccagttgatgtataagaccgacatcgtgaagaaaaacaatattaagttcacgcccaatattatctacggggaggatacagagttcgcacttaaagcactgtcctttggtgacagaatatccataagcaatgaagtaacgtactactacatccagcacgagcaaagcgcgatccgcacctctgaatttaagcggtttgagatcgtcggcatcttcgaaaacctagcccagtactataagaaccagggcaagactgacctcgccaatctgatcattacctctcgaatcccgaaagctatatttggcaatatgaattattttttctacaataactacgatttcgacgacgtgatcgccaaaatgcaccagctcaacctgtttaccaagttgtctaaattcgaaggcgattttaagttcaagttcaagataagactgttccttttaaacccaaagatttactataagatatggcgcaaagtgaaaaattcgatcgattga

SEQ ID NO: 9982 - DNA, 960 bp, synthetic construct
  source 1..960: mol_type = other DNA
atgaaggtgtcagtggtaacaccaaactacaacggggagaaattcctaaagacctttttgaagtcccttaacgaggacagtcagtacatcggagaggtgataattgtggacaacggctcggatgacggtagtctcgactacctgaagaacaatagcttcagtttcccattagtactgatcgaaaacaaggaaaacatcggattctcccccgctgtgaaccagggcatcaagatctcgcaaaataatctgattttctcaatcaacaatgatactgagatcaaaaaggggtcaattaaaagccttgtggacctgatcaactccagcgatgatattttctctgttcaggctaagatgctccagtataacaataaaaacctaattgatgacgtcggagacgagtacaatttgctcgggtggacgaagaaaataggcgagaatcaccacagcaatgaatacaacaaagtcaaaaggatattttcttcctgtgccggagccgcgatgtacaacaagtccattctcgacgaaatcggcctcttcgacgataacttctttgcctatatggaagatgtggacctggccatccgctcccacatcaacggttataggaatttgtcatgcccggacgcgatcgtttaccatattgggagcgcaacaagcggtagcagatataacgagttcaaggttaaactggctgcacggaacaacgtctgggtcatctacaagaatttacccgtgcctcttaagattgtcaatttcatttttatcttcctgggcttcctgatcaaatacctgttcttttataaaaagggattcggcagcacttacctgagtgggattcgagagggcctgtccgccaaaagtaagatcagcaaagtgaagtttgagagcaagaataccaagaactattttaagctcgaatttcgcctgataataaataccatcaagtttctgaaacggtga

SEQ ID NO: 9983 - DNA, 858 bp, synthetic construct
  source 1..858: mol_type = other DNA
atggatctgtcaattgtaattctgaattaccagacctttgagcttaccaagaatacgattaactctatatttgagtacgaatactcctttgactatgagatcctggtggtggacaacgcatcaggtgacgacagtctggttcgcctcaaggagtacttcggcgacaaggtcaatttcatcgcctccaaagagaacaatgggttcgccgccggcaacaaccaggccttgaaaattgcaaatggcaaatacatcctgctcctgaatagcgacacgatagtttgggaagacacactggagaatatctacaactacatggaaaagcacaacgacgtgggggtcagcgggtgccgagtgcttctggagaacggcgagctggataaggcctgtaagaggagtttcccgaacgtgaaaaacagcttcttcaggttattccatattccaaccagcagcaaggataatgattataacctggacaatcttcccgatgatggaatctacgaaatcgactgtctcactggagccttcatgttcatgcgggctgacgctctaaaagacgcgggactactcgatgaaacattcttcatgtatggtgaggacatcgatttctgctttagagtcaaaaagactgggtggaagatcacatactacggcaagagcaagatcacccacttgaaaggagcctccagtaagaaacaaaaatcgaagctcatctatgaattttatcgggcaatgtatatttattacaaaaagcaccatgctgatgactccctgtttctcttgaactggattgtgtactttggcatagcgatcctgtgcgtgctgaagctgtttttaaacctctttaagaagaaagattga

SEQ ID NO: 9984 - DNA, 1404 bp, synthetic construct
  source 1..1404: mol_type = other DNA
atgattaaggagaatcagaaactgcttaatttctcactggtactgatcgatgtgatcgtcattggactggccctgctctgcagcctctggctacgattcaagactactctattcggtcccatcggcggacatctgggcttctttaactacctccttttcttcacatttgccgtgatccccgtgtatctaatcctctattttgcctttgggctgtataagccgcgcagaacttacaagaacattttctcagaggcaacacagctgatcaaagtcaatatattggcctttatcacactcgtttccatcctcttcattataaaccaacctgacttctcgagaatcatgctgattcttctcgccatcattgcttcattcttcggcatcatcgagaggtttaccatccgcaccatcctgaggaaaatgcgaattaataatcgtaatattaagcatattctgatcgttggggataacgaactggcgttcagctttgctcgtaaaatccgggaaaacccatacttgggcttcgtggtcagcggctttctcgggcggtccgagcacataggtcgggagatagacgggtgcagcgtcatcggaagctttgaggacatcgacaaaattcttgacaagaaccgatttgatagggttgtgctggctatccctctgaagtactattacaaaatcaacgacctggtggagtcctgtgaaagggtgggaatcaaagcggagattattcctgattacatcaggtacttcccagcccagccttcggtggacatgatcgaggacataccgattatcaacataagatacgtgccgctggatgacgactttaataagttcttgaaatacctgagcgattacattatttccatcatcgccattattatcaccagccccataatggtagtcaccgcaattgccatcaagttgagcagcaacgggccaatcatatttaagcaggagagaatcggctacaactccaagcccttcatgatgtataaattccggagtatgaaggtgcaggaccccagtgaagaaaaagccgaatggaccacaaaggacgaccccagaaagacgaaagtcggacaatttatacgcaagacaagtattgatgagttaccccagttcttcaacgtgttgaaaggggacatgagtgtggtcggtccacgccccgaacgcccatacttcgttgatcagtttaaggaaacggtgccaaagtatatggtcaaacaccaggtgaagcctggcttaaccggctgggctcaaatccacggttgccggggagacacgtccatcaagaaacggatcgaatatgatattgagtacgtagagaactggcacatgggcctggatctcgcaataatgattaagaccgcacttaagaagaaccctaatgcttattga

SEQ ID NO: 9985 - DNA, 2625 bp, synthetic construct
  source 1..2625: mol_type = other DNA
atgcaggaaaagattctgaagctttatgagaaaatcaaagaccagctgtccgaagacgaatttcaagccgagatggccgagattcgggaaaataacgcggacgtcacattcttcgatgatttggacattgcacatatggtgctgcagaatcacggcatcgaaaacacaattgcgcagaaagaagaagacactaaccagctcagctttgagagcagcgatgggaccggattcacaatgaccgaagaaatcttggagaagtataataaggtgaaggacaaaattagcgaagaggagttcctggctaagatgaaggttcacgccgaaaagaatgagcacgcctccttcatgaacgacgttacattcgctgacatggtcgtgggcgagtttataacggaggaggtcgagagcgtctcccagagccccgagttttccgataaagcgataagcgatcttgaggaaaacagcaaagacgtgactgtgagcggcagggtcatatccatttccaaccccagatcttttaaaacccggaagggacagagtggagaggtgtgcaatgtggagctgaaggataactccgggtcactcagggctgtgttttggacgcaaaatatcaagctcctgaagaacgtgaatgagggggatatcatccagatcaagggggtggatatcaaagaggggtactcgggcctggaagccaatctgaggccacgctctatcctggtgcacctcgaggaggacacctcaaagttccccgaatacaaagaggacatcaccgatattgccgacattaaaccagacacgaaagttaacataatcgcaaggataatcagaatccccaccatcaggacctatgagaagaacggcaaggaggggaaggttgcctcgattgaactgcaggactactctggcaaaatcacttacaccctatggaataaaaatgtggagctcattaacgacctgggcctggaagatggtgactcagtgaaaatcatccaagcccaggctcgggagcgcattaacagggatggcggatcggagctgtccttaacccactgggatggacgcatcatcaagggggaatttgacgtgccggaagttaagcaggagttcacgcctattggcgatgtattcgaggcgcaggatgtgtctatcaagggcatcgtgtcacgactccaggacatcaaaacattcctcagaaaaagtgatggttccgaaggaagactacggaatttcgacgtgcgcgatatcacaggcgagatacgcgtaactctttggggtgatgacacaactctacccatcaataagggagacattattaaaataatcgggggtaacgtccgatacgacgagtacacacagagtcaatactcaatgaacactaactttaacactcagatcaccattaaccctgagaatctgtctactgaagagctggatgagctgaacacactgagagaggagttacgccccaccccaatcggagaaatttacaccattgatgacgacggcattgagatcgatgtacgcggtagaattttgagcgtggatgacgtcaacgaatttcagagagacgatggaagtgtgggcattgtccgttcaataatcttcgccgatgaaagcgggaaggtccggttgtctctgtggaacgagcgggctgaagaggaatatatagtaggggacgcctaccagattgagaacgcacgcactcggctcggcatgtatagcgttgacctaaatatcggtagtggggctcggctgatcaagctttcagaggaacaggcctccagcatgttcatcccagagctctccacactggaaaaggccctctacgactacaagaagatcgaggagatcgacgaagatgaccaggacatcataataatcgggcgcgtcatcgaattaaatgatattcggaacttcgaaagagacaatggtgataccggttcagtgcgaaacattgagctggccgatgaaaccggatcgatgagggtggtgctctgggacgacgacgcaaagcgcgagtttgagatcggccagcccatcaaattgcaaaacccacgtttcgacttggatagggacaaccgtatcgaggcaatcgtcaaccgatccacggccattcttgagccaagtgaaagtgaaatagagaagttacccacgcaagatgagctgatggaggcaatctatgtgccgaaacctattgaggcacttacagaggacgatgttaatgtgtgcgtaaccggcaccatcagtgacatcgagagcgacagagttattcggaagaaatgcccttcttgtggaaataacatagaggagagtgaggacgagtacatctgcgacaactgtggccatgtcttcgatgaacctcgatatctcctcatggtgccgctgaggattgaagatgataccggcagcataaaagtcactttctttgacaagctggctgaagaacttattggaatgaacaaggaagaaatcatcaacattatcgaggatggctatggaattgaggacaaactggaggacctgaatgggcagaccatcgaaattatagctaatgtgtcctttgacgagtacagcgaagagaacaggctgaatcctaagaagatcttgagcaagtatatttga

SEQ ID NO: 9986 - DNA, 936 bp, synthetic construct
  source 1..936: mol_type = other DNA
atggtggagctcagcgacctgcccggtgtgggagaaaaaacagcagaaaagctccgcgacgcaggcttcgcggacatgatgagactcgccactgcgaccgccaaagagctatccgtaaaagcagaaattggtgaaggggtggccgagaaggttatcgaggccgcccggaggtccgagaacatagacttcgagacggcactggaggtggatgagcgacggaaagatgttggtcacatcacggtcgggagccaggagtttaacgacctgattgggggagggatcgaaacccagtcaatcaccgaagtcttcggcgaatttggatctggcaagagtcagatctctcatgagctggctgtcacagtgcaattacctgaagaattgggcggccttgatggcgaatgcgtatttgttgatactgagaacacattccggccagagaggatcaggcagatagccgagggtttcgagctggatgtcgaggaggttctgggcagaatccatgtggctcgtgctttcaactcgtcccaccaaatactcatggtggacaaaattaatgatctcatccagagtgggaagaatgtgaagctggtcattgtggactccctgatggcccacttcagagccgagtacgtgggacgagagagcctggccgtaaggcagcagaagctgaatcagcatctccactcacttcagcagattgctaacacctataacgtggccgtctttatcaccaatcaagtgcaggctaagccagactcattctttggcagtcccacaaaagccatcggagggcacgtgctgggacatgctagcacttaccgcatctggcttaagaagggattggcgggcaagcgcatcgcacggctagtggactccccgcacttgcccgagggcgaatgtgtctttaaaattaccagcgaagggattgtcagctga

SEQ ID NO: 9987 - DNA, 906 bp, synthetic construct
  source 1..906: mol_type = other DNA
atggacgcgatagccattactattttctcgatcatcataatgattggattgggctattttcttaaaagaattgattttctgtctaagaaagacatggacccatttaacaaaatcgtaatgtatatcttaatgccctgcatgatatttcacgcaatctacaatgccgatctctcatctcttcccaagttgagcctcctgcctttcgtgatcctggctagctccatcgtcaccggcgtgatcagttacttcattttaaaacggctgaaccttgatgacaagcaggtctggagtgtattggttaccgtcatgattgctaatacggccttcatgggatacccagtgaccctgggaatttacggccaaactgggttccttcgcgcaatattttgcgacattgccacactgtccatgttcctgctgctctcgtttgtgctgatcctgcggttcggcggaacagtgaagacagctatcaggaagatagctatttttccgccactgtgggccgttattctcgggctcattttcaacctcctcaacatccccattggtgatgtgtgtgagtataccgtgaactacctgggtcagggggctattcctttgatcatgatcactctggggctgtccattgacttttcagcactggcccgaagtaagtccatgatcatcttcacctcaatcatgaagctagcgttcttccccctcgtcgcattcttgcttgccacaaagctcggcctagtggacctgcagtacaatgtgagcatcatcgaggccgccatgcctagcggcatgatgagcctgttgcttgcgatcacctacaaattagattatgaactgacgagcgactgcatactgatcaacacggtcatctccctgatcaccctaccggttatcataagcctcctgtga

SEQ ID NO: 9988 - DNA, 1992 bp, synthetic construct
  source 1..1992: mol_type = other DNA
atggccgaagaaaaacgcgataataatgaggagctgaggattggggtgtatgtctgccactgcggtgtgaacgttgggggcgtcgtggactgccctaatgtcgcagagtatgctaagacactcccaaatgtggttcattcaactgactataaatacatgtgtagcgaccccggccaagctatgatccaggaggacatcaaggagaagaacttaaacagagtggtggtggcagcctgctccccgcgacttcacgagcctaccttccggcggtgcgtggaggaggccggcctgaacaagtttttgttcgaatttgctaatctgagagaacaggacagctgggtgcacatgaacgaacccgaggccgctaccgagaaggccaaggatctagtgcgtatggctgtggccaaggctaggttgctcgaaccactggaggctacgaaggtcgccgtagataacaaagcgctggttatcggcggcggcgtgtgcggcatccagacggccctggacttgggtgatatgggattcaaaacatacatggtcgaacgaaaccccaccattggtggacggatgggacagctggacaaaactttcccgacgcttgactgctcaatgtgcattctggcacctaagatggtagactgtgccaagcacgagaacatagagctaatttcatacgctgaggttaaggaggttgacggatacatcggcaactttacagtgaaagtagagaaaaaggcaaggtatgtggatgaggacctctgtaccggatgtggagcgtgcgtggaagcgtgtcccatcgagatacctaactattacgatgaaggggtagggatggtgaaagccgcatatatcccattcccccaggcggtgcccttgtgcgctactattgataaggattactgcattgagtgtatgctatgcactcaagcttgtggaccggatgcaatagatcacaatcaggaagccaccgagatcgaactcgaggttggcactattgtggccgctatcgggtacgatcccttcgacccatcgggaatttaccagtatgggtacgggcggtacaccaacgtgatcaccgccatggagatcgagaggatgatcaatgcatccgggcctaccggcggccatgtcatcaagcctagcgacgggattgaacccaagcgcgtcgcttttatccactgcgtgggtagccgcgacgagacaatcgggaagccttactgtagcagagtgtgttgcatgtactccatgaaaaatgcccaattatgtatcgaccacgaacccgatactgaagtcacgtgctactacatggacatacgggccttcgggaagggatatgaggagttctacaaaacgagccaagaaaaatatggaattgaatttatccgaggaaagccagcacagatcttcgaaaatgatgatctgacactgaccatccgcgccgaggataccctgcttggtaaggtgaccgagtacacatatgatctggtggtcctgagtgtaggtctcgagcatgccgaaggctcggacgagctccgccagacactgggggtttccaaatccgccgatggattttatatggaagcccacccaaagctcaggccagttgacacactcactgacggcgtgtacattgcgggtgtcgcacagggccccaaggacattcctgacagcgtcgctcagggcagtgcggccgccagtagagcagccatacccatggcacagggagaggtcgaaatcgagccgatcattgccagcaacgacgaggcgatctgcggcgcctgccaggtgtgcgtggagctgtgtccctacggcgccattgctatcgcaaccggtgtcggcggcaaggaatttgcccagattaactccgccctgtgtaagggatgcgggacctgtgtaggggcttgtccaagcggcgcgatgaaccaacagcatttcaaaacagagcagataatggcacagatcagtgccgctcttgaagacataggcaaatga

SEQ ID NO: 9989 - DNA, 1239 bp, synthetic construct
  source 1..1239: mol_type = other DNA
ctcatacactcgcaaaaattcaattactataatgagaacctgtcctggatcattggtgacaccatgaacgagatattcaggacttttacatccgaatcggtcacgcagggccatcctgacaagattgccgacatcgtgtctgacgcgatactggatgcctatatggccaaggacaagaactcccatgttgcctgtgagacctgtctcacaacggacttttgcatggtcttcggcgaaataacatctgcgggtcacctgtcagagaatgagattgaagatattatcaggaatacaattattgaaatcggttatgataactccgatctgaagtttgatgggcacagttgtgagattctgaacaagcttcacgagcaatctgcagatatcaaccagggcgtggacaggggagatgatgagaccggagctggggaccaggggatgatgttcgggttcgcaactaatgagaccgagagccttatgccgtacccaatcgacctggctagaaagctgacaaataaactgacagagctgagagagacgggcgagatcccatacctacgacctgacggtaaagcccaggtaagcgtgaactacgacaaagaggggaacgttgtgagtctcgacgccgtggtcctcagcacccagcacgacgaatcaatgagcgataatcaggagcagttaaaggaggatatccgggaaaagctattcaaggccgtgatacccgaggagctgatgaccgaaaacactaaagaacacatcaaccctactggcaagttcgaaattggtgggccccacggagacgccggattgacagggcggaagatcatcgtggacacttacggaggctatgctcgccatggaggaggcgcattttcaggcaaagactgcaccaaagttgaccggagtgcatgctacatggcgcgctacatcgccaagaacatcgtagccagcggcctcgctagcaagtgcgaaatccagctgagctatgccatcggcgtggcagaaccaacttccgtcatggtggatacctttggaacgggcgctaatatcggagatctcaccttcgagaaaatagtccgagaaaacttcaaattaacccccgatggcattattgaaacattggggcttagagacattacctataagcaaacggctaagtacggccattttggtatcgacgggctgccctgggagaagaccgacaaaatcgatgagttgcgcaagtacatcaaaaactga

SEQ ID NO: 9990 - DNA, 1269 bp, synthetic construct
  source 1..1269: mol_type = other DNA
atgactaattaccacgacgagatcctgaactttgagaaaatcgcaaaggagcatacggagtacatgagaaattccgttaacctcatagcctcggaaaacgtgacgagtgtggaggtcaccgaagccctagccaccgattttgctcacagatatgctgagggacaggcctttgaaagattctacgagggctgccagtacgtcgacctgatcgaggaccgcaccaaaaagcttagctgcaaggtatacgactgtgattatgctaatgtgcagcccgtgtctggggtaacggcaaacctggcagcctttttcggattctccaaccccggggagaaggtgatggcgcttgaagtcccgtctggcggccatatcagccatgccgacgtaagtgctgcggggattcggggactgaaaaccgtcttccacccattagacaaggatatcatgaacatagacattgacgccatgaacaagaaaatcattgaagagaagcccaagatcattctgttcggaggcagtttattcttgttccctcatcccattaaggaggcccgtgaagcggctgacgaagtgggcgccaaaatcatgtacgacggcgcccatgttctgggcctgattgccggagggcagttccagcaacctcttaaagagggagctgacctgatgatgggaagcacccacaagacattcccagggcctcagggcggcatcatcctctcacacgaagaaaatgccgagatcattgataatgccgtgttcccgggtgttgtcagcaaccaccatctccaccacctcctaggtttggggattgctacagccgaaatgttggagtttggtgaggattatgcaaagcagatcatcaaaaacgcccaggctctggggcaggcaatgtatgaacggggctttgacgtcctgtgcgaggagcaggggttcacccaatcccaccagattgccgttaatcttacaaacatacgatcagcatccgatattgcacgggagctggccgataataacgtgatcctgaacaagaatctgctccccggagataacagggacaacagcgatgatccatctggcatcaggataggtactcaagagatcactcgcaggggcctcaaagaaaaggagatggacgaggtggctgagtttataaagcgggtggctgtggacaaagaaaatatcgcggatgaggtggccgaatttatgaatcagtacacaaagctcgactacgcattcagcgatcgagacgcgtaccaatatcaccgcctgtga

SEQ ID NO: 9991 - DNA, 693 bp, synthetic construct
  source 1..693: mol_type = other DNA
atgcggataggattcgccttcacgggggccggacacctgcttaaggagtcagtccaggtggccgaaaagctggctaacgaccatgaggtcaccatcttcctgtccggtgccgcggaggaagttctgaaaatgtatgggttgtacgagagagtcaaaagcctcactggtggaaaataccgggaacttgcaactgactctgaccagaaattctcctaccccataactggccgactgagcctcggaaagtatgacctgctgatcgtgtcccccgctaccgccaatacggtgtcaaagatcgtttacgggatagcagacaccttagtcacaaacgctgtagcgcagagcggcaaaggcgctgtgcccgtatacatggtgcctgtggatatccaccccggccctattgacaccgtgctaccaagcaagatggagctgtcgaagtgtcagagttgcgatgactgctttgcctctattgcctgcgagcaaggggcaatcctgccacatgaagaaatcgatctaacaaaatgtattgggtgcggcttgtgccgcaacacatgtccgtacgatgcaattagcgagggcaagatcattacaatctatatgagggacattgatatcgaaaatacctgtaagctctccagtatcgataacattcagatatttgagaatccacacgagatcctcgacaagatctga

SEQ ID NO: 9992 - DNA, 318 bp, synthetic construct
  source 1..318: mol_type = other DNA
atgatatacaacaacgaacagattaacatcaagataacctacgccaataacttttacaaacggtttaagggcttgatgctgaaaaaggactttgatgacggactcctgttcacaaatcttaaggatagcagcatccacactttcttcatgaggttcgagattgatgtgtatttcctgaatgagaagaaatatattttcgaaaagacctccctgaaaccatggaagttctataagcccaaaaagcaggcaaagtacatcctagagacgagaaaaaacaagctcaaactgaagatcggggaccgcctcgactttatctga

SEQ ID NO: 9993 - DNA, 663 bp, synthetic construct
  source 1..663: mol_type = other DNA
atgatcattgagtacctgagcgacttcaactgcccatattcctatatcggcctgaatcgcatcatgagtgtgtgcaaccacttgaacctggacgtcatatgggaaatgaaatctttcgaacttgagccggaactcaacaacatcccaacatgcagcatcgataggtacgcaatcagaaaccgactgagcattaaagatgccgagaatgagatcgaggaaattgaaaaaatcgcgcaggacgaaggactgaatatcaattacaaaaacatgcagctgtcaagtagcaaggacgcccatcgcctggtgaagtatgtagaacggaattaccctacattaactcaagagatcgtgctgaagatatttgagtccaattttattaagaatgagaacatttcagattacaacgtcctgataaagattgctatctcctgtaagttgaatgaaaaagagatctacgagtttctcaaaaaggaaacctattcgatcgaggtggaccttgacatggatgaggcaatcagcaacggcataaacacgattccctactatttcattaattacaacgacgagcggctcattatacccggtgttttcgagaaggaggacttcaaaaccgccctagaggatctcgtgaacggggaaatgaagaacaagacctttatctga

SEQ ID NO: 9994 - DNA, 111 bp, synthetic construct
  source 1..111: mol_type = other DNA
atgggcttttataggaaatacaataccatcattcggacaatcgacaacttcgtcaagctgtacaaagtggccaagaaggatagcgagaagagcaaggacgacaaaaaatga

SEQ ID NO: 9995 - DNA, 3237 bp, synthetic construct
  source 1..3237: mol_type = other DNA
atgccaatacacgaggcagagaaatcatatgagcacgacaaaatagaaaagaaggtccaaaaattctggaaagaggaggatactttcaagaaggttaacgagctgcgcgagaagggccctaagtacagcttcctggatggcccaccctactgtagcgggaaaatccacctggggacagcctggaacaaggtgatcaaggactcgtacctgcggttcaagtcaatgaacggatttggcctccgccgccaggcaggctgggatatgcatggtcttcccattgagaataaggtggaacacctgatgggcattcagagcaagcaagaaatcgaagaggacatcggcatagctgctttcgtggacaagtgcagggaatttgccatcgagaacaaaatagcaatggagcaagagtttgaccagctgggtgtttggatggactgggataacccatacatgacacttgaccctaaatacatggaatcttcctggtggacacttaagagggccaacgagcaagatctgcttgtgaacgaccagagagtcatcagttggtgccctcactgcggcacggccctggcagccgcggagatagagtatgaagaaaaggccgatccctcgatttatatcaagttccccgtcaggggagaggagaatacttacttcctcgtttggacaaccaccccatggactcttcccgcaaatatggcaatctgtgccaacccggagtttgactatgtgtatgtgagcaaggacggggaaacctacattctggctgagaacctaattgaggaggtactgggtaagcaggttaagattcaccgcaccgagatcagcgatgattctgaagacggcgagaatcaaatcatcgaggaaaaggagatcatgtacgagatcattaagacagtgaagggggaggacttgatcggcatgagttatgactatatcctggccgacgaggtgcccatacatgacaagtttgacgagattgatgcggtgcacaccgtgctggaaggcaaccatgtggaactaggtgaaggtacgggcctcgtccacaccgcacccgggcacgggccagacgatttcgaggtgggtcaggctaacaatattcctatcttctgcccggtgggggaggacggctgtttcaccgaggaagctggcaagtataatgctaaattcactaaggatgaaaattcccagatcatcaaagatttggaggacaaaggactgatgtacaagtcagaaacaattgaacacagatatggtgtctgttggaggtgcaagacccccatcatctatcgggcgactaaacagtggtttctcaaggtgaccgacatcaaacagaaaatgctcgatgagattggccgtgtggaatgggtcccaaaatgggccggggaagggcgattctacgattgggtggataatgcgcgggactggacaatctccagacagaggtactggggcattccaattcctatatgggagtgtcctgactgtggggaactgaaagttattggttctcttaatgagctcaaagaggagtcactgaatgacattaatgtgtcggacgccgagctgatacataggccgtacgtcgatgaggtggaggttaaatgcgataagtgcggaaaggtgattaagcgaatccccgacgtgttggatgtgtggatcgattccggggtagctggctgggcctcactctactatccagaagagaaagaaaaattcgaagaatggtatccttacgactttataacggagggccatgatcagaccagaggatggttctactcccagctgggcactggcgtgatttccatgggcaaaagcccatacaaaaaagtattgatgcacggattcgtgttggatgagcacggaaataagatgtctaaaagcctggggaacgtagtctccccggaagaggtcatcgaaaaatacggggctgacgttttacgattctacctgctgtgggcctccaagccctgggatgacttaaaattcgtgtgggatgaacttctcaacattaataaaatgttcaacatcttgtggaatgtgtacgtattcagcactacctacatgtcacttgacaactttaaccctatcggactgacggaaaaggacatgattctaagagccgaggacaaatggatcatctctaaggcgaacacgttagtcaaggaggtcaccgaggacttggacaaactgttcttccataaggccacacgcaaaatcaataactttattctggaagatctgagccggtggtatgtcaggctgatccggggacgcacttgggtggagagcgatgaccctgacaagctcggggcctactacagtctctacacagctctggtcaagttaatcagcgtcctgtgtccaatagctcctcatgtgtctgaggagatctatgaaaacctagtcaaaggcgtgaaccccgatgccctggagagtattcacatgaacgactggggatacgacgatgacgccatcgacacagagctcgaatccaagatggacgttgtccggaatgtgattgatgcctctatccgggcccgtgatattgcacagtacaagctcaggtggccggtttcagacatcacggtggtgagccaggatgaaaacatcctcaaggctatcgaggagctcactgacattattaaggaccagtccaacacaaaggatgtactgtgcgcgagtgaatttgaaaagctgtcctttaatgccaaacccaacctcaagaccctgggcccccggcttaaaggagacatggggaaggtaatgaaggctctgaaagagagtgacggcaaccaaataaaggaggatattgaggcaaatggaagcatcaccgtagaaggtcatgagctgagcaacggagatgtcctattcgactccgaactccccgatgactttgtttcgagcgaatttgaggggggaaatgtctttgtcaatactaacgtgaccctggaaatcaagcaggaggccatggcccgtgaattaataagacgaatccaggacatgagaaaagatttggatttggacgtggaggcaaacatcaacgtggatgtggagaccagcgacgaatttaaggaactcatcgttcctcagtctgaggtgatcagccacgaagttcgcgctaagagtctgatcatatccaccagtgaagagtgcagtaagtattccaaggactataccaaggagtgggacattgagggagagaaggtgattatctcaattaaaaactga

SEQ ID NO: 9996 - DNA, 2139 bp, synthetic construct
  source 1..2139: mol_type = other DNA
atgacgctcgctgactccgagattgaatatatcgaaggcatccttggtaggaagatgaatgagctcgaggagggaatgttggatgtgatgttcagcgagcactgttcttacaaaagtagccgcccctttctgcgcgccttccccaccgaaggcaaaaatatcatcctagggcccggcgatgacgcgggacttgtatctatcaccgataaatatgccctggcggtcggaatggaatcccacaaccaccccagcgctatcgagccttacgggggtgcaggcaccggcatcggaggtattctaagagacataatatcgatgggcgccatgcctatagcccttctggactcactgaggtttggaccactcgaagacgacaaatccagatatctctttgaacatgttgtgaagggaatttccgactacgggaaccgggtaggcatcccaacggtggccggcgaaatcgagtttgatgagtcattccgaacaaatccactggtgaacgtcatgtgtgtcggactggtcgagaaagacaagatcgtgcgggctcaggccccgaacatcggtgatgtgttcctgctaatgggcggaacaactggccgggatggcatccacggggtcacattcgcatctgaagagttgacctcggattccgagacagaagacaggcccgctgtacaggtggcagatccgttcactaagaaacgggtcctggaggcatcactggagatcctggagaagatcaatgtgagtggggtgaaggacctggggggggggggtcttacctgctgcatctctgaacttgtcgatagctccagtaacggtgccttggtagacctgcggtcaatcccactcagggagacagggatgaccccatacgaaatcatgttgagcgagagccaagagaggatggtgtttgtcattggtcctaacgacgtggagcttgcgtgtcagatctgcgacaagcatgagattagttcttccatcgttggcgaggtgatcgaaggaaacaacatgattatctcggacgaagggaacgagattgctaacctgcctaccatcttgctcgccgacccgccctccatcaatcgtcccatcgttgagatatcggccgataccgagaagattgatgtgaaagagccttcaatactgaaatcactcccggccctcctgtccagttcaaacattgctagcaaggaatgggtttacaagcagtatgaccacgaggttcaggtccgcactgtggtcaagcctggggatgacgccgccgtgttaagaatcgatgagaacactgctattgcactcactaccgatagcaatacaattcacacgaagttaagccccttcgatggggcggcaggctgtgttgccgaagccattagaaacgtcattagcatgggggcaaccccatacgccgtggtggactgcctcaacttcggaaatcccgagacgcccgagattctatggcaattcaagacagctatcgagggaatgagtctggttgctgaaaaatttgatgctcccgtgattagtggcaacgtcagcttctacaacgagactgaaggtgtgaaaatcaatccaacacctgccgtgggcgtaattggtgtggaggatattgaaaatatacgcacactcgacttcaaaaatgagggagacaagatcatattgataggcaagacctacgacgaactgtctggatctgaatatcatcgaaccgtgcataatattgaaaagggcacggcgccaaaaatccgaatagaggaggaagtcgcgaacgggaagaccgtgctcgacctgataggcaaggacaaagacaagaacatcactgcagtacacgatgtgtccgctggaggactggcagtcgccctgagcgaaatggttattaagtccggcctgggctgcgaagtgaccctgcgcgatgacgagctggataagattcagctgctttacagcgaaagtcacgccagatatttgctcactgtgaaagccgacgccgtggatgacatcctgagcaagattgacgtggaggcaaatgtcatcggcgaggtgaaagggacctccctgttcatcaacggccacgagtttaagtttgaggacttagatgacgcctatcatggggttatcgagcagtacatggcttga

SEQ ID NO: 9997 - DNA, 1218 bp, synthetic construct
  source 1..1218: mol_type = other DNA
atgttcctgtccaagttagactcgctagccaatgctatcaaactcgtcaaggacaatcagaagttcacggaggtggaagaggtaccaatctctgaagcacacaaacgggtgcttgccgaagacatcatggcatttcacgatagcccacccttcgataaatctagcatggacggctatgcggtcattgctgaaaatacgtttggagcctcacaatccgcccctaaaaagtttaaaatcattgacgcaataggcgctggggatttttcctccaaaatcgtgaatagtaacgaggccatcattatcgccactggtgccccaatccctgacggagctaatgccgttctgatgaaggaatacacgacctcagacgaggatgatctgacaatctatagccaggtcacccccggcgagaacattagtccgaagagcgaggacatcgagaaaggccaaaaggtcttgtgtaagaataccttcatacgataccaggaaatgggtcttattgctagcgcaggctacgatacagttaaagtgttcaagaagcccagggtgaaaattattatcaccggtaacgagttggtcgagcccacaaaggaggagattgacaaggcgaagatcattaactcaaaccagttcaccaccaaagccatggttgaagacagcggagctattgctgaaattactcacgctggagataccttcggcgaagtgcgggaagccatcctcgaagcctctctggagtttgacgtgatcatcactactgggggaacagccatcagtaagggcgatgtggttctcgacgcactggccgacctaggggaaatactgttccacggtgtggctgtgaggccggggaagcctgtaggcgcgggcatcgtaaacggaaagatgatatttaccctttccggacagccagtagcatccatgagtcaattcgatatggtggtgcgcaaatacctctttgagatgcagggcagaccttttgagttccatctccagaaaagagtctccgagctgaaggtccccagccagctggggcgcacagattttatacgggccgttgccgatgacgagtgcgcaaagcatgtcttgaacagggggtcggggattatccgttcaatggtggaggcgaacagctatatcatcattgacgagaacgacgagggctaccagaaggatgatatagtggacgtggtgttcttcgacagcctgctgtggtga

SEQ ID NO: 9998 - DNA, 1131 bp, synthetic construct
  source 1..1131: mol_type = other DNA
atgaacggcatttactattatctgattgctttcgtgatcatctggatgctggtcacaatcttccatgataagctcagcaaccacgggtttgagctgaacttccctatcataatgtggaagactcaaaagctgaagggcctgatatccaaaatcagcaatttttcacccacattttggaaatggtatatgaacgtggggatcgttgtcgcctttggagcgatgattctggtgaccggatctatcatctcgtccataccaagcatcttcgaaacccctagcgtgtcgatccttattcctggcgttgacatcccaggctcccagatttatgtgcccttcatttacggtctaattggtctggccaccgtggtgataatccatgagttcagccacggtatccagtcagtctgcgagaaaatcccaatcaagtccatggggttgctcctgttttttattcttccaggggcattcgtcgagcctgacgaaaagagtctcaaaaactctaagaacgcctcaaagttaaggatctacgcagccggctcagtggcgaatattaccttggccgtagttgctctgatgttaatctctctgatatcaatcggtattccccactactttgccgaagatgggatcagcatcgaccggatcgtttctgactctccttccgagggcatcctaaaggagggcatgattttgcaggctattgacaatcataaaattaatgattccgagagctacgtcaatattgtgaaaagcttcaaacccggggataacgtcactgtgcagacgaaccaaggcagttacagcgtcgtgctgagtaagaatcccaacaacgacagcgtgggattcttcggaatccaggccgccaagcactatgtgcttctgaatgacagtctgggaccgataccgtggatcttgttcgagctcttcgagctgttcaactgggtgtttatcctgaaccttggaatcggactctttaacctacttccactcaagcccctcgatggcgggcacatgttggaaacactcctgtcctacaaatttaaggaacagctggtcaagaaatttgtaaatgcactgtccggcgtgatggcaataataattgtattcagtatcattgctggcttcctctga

SEQ ID NO: 9999 - DNA, 1227 bp, synthetic construct
  source 1..1227: mol_type = other DNA
atgaaggcgaacgcccaaaaaatagctgatggagtctactggatcggtgtactcgactgggatttgagaacttaccacgggtacacactggacggaaccacgtataatgcttacatagtgtttggagaagacgaagtcgccattattgacaacgcgtaccccggcaaaaccaaggagatgatggcgcgcattgacgatgcctttgcacaggaaggaagggacgttaaagttgactacatcgtccagaaccatgtggaaaaggaccacagcggcgtgctggtagatctgcacaaaaaattcccagaggctcccatctattgtaccgaaattgccgtgaaagggctgctgaaacactatcctgcactggaaggtgcagagtttgtcactgtgggcaccggggactccctagatgtggggggccgaactttggctttcctggatgctttcttactacattggccagacagtatgttcaccctgctcgccgacgagaccggcatccttttccccaatgatgcatttggccaacacctttgttttacaaagcggttctccgacgaaatacctgaaaatgtcttgatggatgcagcccagaagttctacgccaacctcatcacaccgctgtccaaactggtcctgaagaagctgaacgaggtggtggagctcgggctgctcgattccattaagatgattgcaccatctcatggccagatctggaccgacccgatgcaggtcatcggcgcttaccagaattgggccactggcgtgtgcgaggataagattacgatcatttatgacactatgcactattcaacccagcaaatggctcatgaaattgctgagggtgctatctctgaaggttacgatgttgaaatattctaccttcacgaggatgagaggtcggagatcgtgaagagcatccttaccagcaagggggttgccatcggcgaccctacaatcaacgatgcgccctatcctagtatcggagacatcatgtactacctcaagggactgctcttcaaccgcacagggatagagcggaaggccgtgacgttcggctcaatggggggcaagggaggaagccccgcaaagctcgccgaggagttagggaactgcggctttgacgtggtagacagtcaggagatctatttcgtgccaacagccgatgaggagaatgccagctttgacttgggtgtgaaactggccaaagcctgcaaggagctgtga

SEQ ID NO: 10000 - DNA, 777 bp, synthetic construct
  source 1..777: mol_type = other DNA
atgagcgaacagaagccaatccaaatctttagcgatagtacagaattgcgggttaacgtggtgaagagtcccgtcaagctcaccatcctagagatgctaagagaccgagatatggagtttgatgagatcgtgattaatacgggcaaaagcaaatccacagtgagcgtgcacctgaagaaccttcgcgaaaacggcattatatcatatcggatgcatcctatcgacaatcgcaaaaaaatcttctatctgaactccaagtacctggggtccgtaaacttctccgaacccaaagaacttgaagagacccagtcggactacttgatcaggaatattgtggagggtgacggacagtttagcacactgctcttccacacgctgaaggcaatgctgatccaggaaggaattaacatcgatcccatccttaagtcaaccggcaaccaaatcggcaagagcatcttctacaaattgtacaatgaggacctcgatatcttcatggacaatctgagcaaattctgggagaagaagggactcgggaggctcactttcgaaatagggcagattattaagattattatttatgactgctttgagtgtgaactgctgccaaaaacaggaaagccagcctgctttttagacaccggcatcatggagggtctgttcactgagtttttcaaactcccggtcagtgttatagagacccagtgttacaccatgggggatggcaagtgcgtcttcgaggtggagcctcagagcataaagctgactaaccacctgtga

SEQ ID NO: 10001 - DNA, 705 bp, synthetic construct
  source 1..705: mol_type = other DNA
atggttaagaaggggaaactcattggcatcggtgtgggaccgggggatactgaactgttaacattgaaggctgcgaaggtcctcgagaaagtcccagtgatctttagccccaagagcgcaaaggagaaagaaagcatcgccctgtccatcgtgaggcctatcctgaaagagagaaaggactacaaaaaaataatgatcgtggaacccatctttcctatgatcgaggataagaaagagcttgagaagatatgggatagtgcatctgagctggtggcacaatatctcaataccggcagagatgtcgccttcattaccctgggagacacctcaatcttcagtacatactcctacttgcagaaacgcctaatggatcgctatgagatagagacgattcccgggattacatcattcacggcgtgtgccgccgccaagaacgaggccctggtagagcagaacgacatccttaccattgttccaaaaatcgacagcaggatcgaaaacattctggaatatactgactccattgtgctgatgaaagctagccggaacagcaccaaactggaactcaagatcaagaatgacaagcgagaaaaggaaatttactccgtgcagaactgcactcgggagaatgagaagatcattgagggcttcagtcacgaaaagccatacctcacaacctcgatcataaagtttaaggacgactga

SEQ ID NO: 10002 - DNA, 1803 bp, synthetic construct
  source 1..1803: mol_type = other DNA
atgctgaaaagcaactgcacctgtggaaagtaccctaaaaaggagagcaagggcccaacaaacttgtttagttttactaagtccaagtcacgcagcagctcaatactggacgacgagatccctgaggtatattacgtggacgaccacaagcaggacgaggggaccgcagcctatctgaaggagctctatccaaacatagatgatgatataattgagaacttcccatttgatgaaccccgcatcggacaattggaaattatccaggacatcaatgatgcgattaaaaagggttacaagtacatcatactcgaggccggaactggaactggcaaaagcgcaatagctacaacattagccaaaatgtatgagtctgcctatatcctgactatgacgaaacagctgcagtcacagtactctgacgagtttgagtttcccctcgttaagggacggggcaattttgcttgtctccacgataacctggagtccacctgtgacataggggcctgcaaaacatcacctacttccagtaaattcttctgcccatatggtgtggccaagaatcccaccctggacgccgagctggctttcgaagactcctttgggggaaccgtgttctaccaaagcagcgggcattgccattactggaatcagaaagccaatgcaattaattcccccatcacactgatgaactatgactatgctatcgtggagcttaactacgtgaagcactttgggacgcggagcctccttatcctggacgaagcccacaacattgaaagtaaacttatgtcgaccatggaggtgaccctctacaatagggtgctcgaaaaggacatcaacaagcagatctcgccgcagactctgaaggacggcgaactggaagattggatcatggaaattgacgcaatcagagaggcatacgaggatattgatttgaaggacgtgagtaaaaataagagcgagaggattcgatccacgatcggtcggctaaagacacttagaaacaatctggaaaaggagccgaagaattgggtgattgatactgacgagtctggtgtcaccttcaagccactacgagtccaccattacgctaaaaataacctgttaaaatatggcgacgtggtcattttcatgagcgcaaccatcctatcccataagatgttttcaaaatggctcggactcaatcctaacgaagtatatcacattaaggtggattcccctttcaccaaagagaaaagacccattgtccttaatctggccggcaagatgtctgctaatcgcattaagaagaccgctcccaagacaatccccatcttgcaggaaatcctgaagaaacacgagggggataagggcctgatccatacgcacagttacaaatgccagcagtacatcataaacaacttatacaactcccgactgatttcgcacaccagcaagaacagggagcagatcttggatttcttcgagaaggatgagaaccctctggtgctggttagcccaagcatgagcgaaggggtcgaccttccatacgacaagtgtaggttccaagtgatctacaagatgccgttcccttacctcggcgataagcaagtcaacatgagaatgaagcgggacaagaagtggtacgcctacaaaacagtaatgacgctgatgcaggcgtatggccgtggcatgagggcggaagacgactcatgctacacctatatcatcgatagtgatattaacatgctgttcaaaagtcccatgtatcgctccttgatccccaacttctttaaagaagccgttgtccgggttaaaaaatga

SEQ ID NO: 10003 - DNA, 963 bp, synthetic construct
  source 1..963: mol_type = other DNA
atgaaagactctaaagagaaggaacatagaatcagcaatctcaaggacctgatcgacaacgtgaaggaggaggattccaatatcgactcacaggaagatagtgaattgataaactatctccacgaagatacagtggattttgatgagctcgagatcaacgacgagttcatctatcaccccgatgatgacgaagactacgtaattaacctggaggaatcccccattgatgaggagtttataatcaacacccccaaggaagaagagctgaaaaacatgtccgatgatctggaggagccagaggacatcatcagtgacgtgagcgaaaactttgaccagttcttcaacgcaaaaattggtaagacaccggtgctggcgatcgttagcagcgttctggggatcatatttatagccatctcaataatcattttcgagtcccggtcggacagggtcatcgacaatgtggtcagcggcgagacgaacttcatttctgtcattgtgcttggcctgggaatcctgttactgatttacggcatatacaaagtattcaacattaagagtcccctaaatgggataaccgagagcatcaattccatcgacggaaaagaaaaggtcaagactaatgcttcgaaggaaaaggaaaccgagaagattatccctaagagcaacatcccattggacaaagactcctacaagatcggggagtttgacatcggcgatattaagaataagttcaagaagtcaactacgtctaagaagcccaagccacgcccggaggacacaaacaatattcctcctgccaaagagaaagaggagaataaaaaggaactcaccatcgaaaaaatcgaagatattgaatataaacaagccaaacttgacaacgaaaccattgacgacattttcgcagaagtggaggacatcgatgagattccaattatctctatcgatagtgaggagaaagagtga

SEQ ID NO: 10004 - DNA, 312 bp, synthetic construct
  source 1..312: mol_type = other DNA
atggagttttgtccggaatgcggcgctatgatgttccccaacaacaacgtgctgaaatgcaatagctgcggttacatcaaggaggactccgataataacgactataaagtgagcaagaagattgaggccgaggaaacggtgaagatgctgggggaagatgtcgacgtcggcccaaggaccgaggagacatgccctgaatgtggacacaatatcgcaacctacaaactcctacagactcggagtgcggatgaggcccccacccgcatattcacatgcgtaaagtgtaaacatacttggagagcctacgactga

SEQ ID NO: 10005 - DNA, 423 bp, synthetic construct
  source 1..423: mol_type = other DNA
atgaataaatacaaaaaaccgagcgtaacaaccgatatcttcatcttcgacgaggattttaactttattctgatcaagcgaaagaataaccctttcaagaattattgggcgctgcccggtggctttgttgactatggggagaccgtcgagagcgccgcaatacgcgaggctaaggaagagacgtccatcgatgtggagctcaaggacctcgtgaacgtctactctaacccagaccgggattcaagggggcacaccataagtatcacatacactgcaaaaggagatttcaatgagagaaaggccaacgatgacgccatcgacattggcatattttccgccgaaaagctggacgaaatcaacattgctttcgaccataataaaattatcaaagactgcctaaacattgtgaagaacgaaaagtga

SEQ ID NO: 10006 - DNA, 282 bp, synthetic construct
  source 1..282: mol_type = other DNA
atggaaaatttcgagatcattgaggataagacgctagaactgaccttcatagtgaaggatgagagccatggcgtgtgcaatgcgcttagacacatcttgatgcagaaccctgacgtagagtacgccgtctataacatcgaccaccccctgactggaaagccagagatgaccatcaaaacaaagcgggggaaaaggccgcgcaacgccctccagaaggccgcagaacagctccaaaaagaaagcgacgaatttaagaaactgattgacgaggctctggagtga

SEQ ID NO: 10007 - DNA, 570 bp, synthetic construct
  source 1..570: mol_type = other DNA
atgaagatagaagaggacgaaattgtgatgcctggggataagctgggcatcatcgaacaatatctgccaggagagggtacctatgatgatgacggcgacattaagagctccgtactgggaaacgttaagatcaatcagaaaatgaaggtcatctcggtggtgtcagatgcgaagccggccctactgaaagtgggagacatcatttacggccagataacggatatcaaaccccagcgcgccaatgtcaacattgaatgtattaaagacaacgcccggccactggcgttgccctacatgggggccatccacatctcccaggcaaaaaaggactatctcgagaagcttagcgacgctttcagaataggggatatcatccaagcaaaggtggtgaagatcactggcgacaatgttgacttaggcagtacagacgatgattgcggtgtcctcaaagccatgtgcactcgctgccgagactacatgcatacaacccagaaggctgatgagctccagtgcaacacctgtaacaggaaagagaagcggaaagtgagcaagaactacattaatgactga

SEQ ID NO: 10008 - DNA, 1005 bp, synthetic construct
  source 1..1005: mol_type = other DNA
atgtccatgtacaacctggatctggacaaagtcatccggaagatcacgtccatggacgcccagactgtggggcttcaattccctgaggggttgaaaatgcaggctataaagatagccaggcagatcgaggaagaaaccgatgcaacggtcgtgatctccggcgacccctgcttcggcgcttgtgacgtgagcgactataagatgaaagggtcagtggatctgatcgtgcattacggacacacccccctccccctcaaatatgaagtgcccacattgtttatcgaggcatattccaacatagatatcaagaaggacctggagaagagcatcgagtacctgaaggactattacagaattggactcgtgacaacgacacaacacctgcacctccttaatgagaccaaagattacttagaagataacggcaaagaggttgtgctcggttcctcaccatcgactaggaagggtcaggtcctcggatgcaactttagctctattaagaaccttgatgcggaagtcatacttttcatagggactggcaatttccaccctctgggaatcaaactgtttagcaacaccccggtaattgccctcgacccatacaatagtgagattcgaagtatggacgagtttgccgacaggatcttgcgcatccgtttcgcccggattacaaaagcgcggggcgctaagaagtggggcatcctggtatctaccaaggaagggcagtacagaatgaccctggcaaaggaaattaaaaagatcctagaggatagcaaaatggaagcctatatcatcctggtggacaatgttagcccggacgtgctgctcccttacttggagttagacgctttcgtggttagtgcctgcccccgcatcgcaattgatgactcacagatgtataaaaagccactgctgaccccacaggagctggagattgtcctaaataagcgcaagtgggagaactaccagctagatgaaattctgttccacgagcattacaagtga

SEQ ID NO: 10009 - DNA, 570 bp, synthetic construct
  source 1..570: mol_type = other DNA
atgctggaggaggtaaaaaaaagcttggaagcctctcctatcgttaagaagggagactacaactacttcgtgaatccgataagcgatggtgtgccagccatggaccccaagatgcttcgcgagctatcactcgcggtgtacaagcacgcagaccttgacgttgataaaatcgtcgccgtggaggctatggggatacatctcgccaccgcactgtccctgacaactgacatcccctttgtggtcatccggaaaaggcagtacggtctggagggagaaacggaggtgtatcagaaaacaggatatgggagctccaatctgtatgtcaacgatttacacgaaggggagaagatactgctcattgacgacgtggtaagtaccggcggaactctgatcgctttgctgaacacgctgaaggacctcggcctcaagattaagagtaccgtggccgtgatcgaaaagggggagggcaagaatatcgtgaaaaaagaaaccggcgttgatgtcatctcgattattaagctagatgtcatcaacggcaaagtcgtgattgagaagacaattgaagattga

SEQ ID NO: 10010 - DNA, 1344 bp, synthetic construct
  source 1..1344: mol_type = other DNA
atgctgggaaacttaggagaaaatcttaccaacaccatgaagaaactagtaggaatgtccgtgatcgacaaaaagaccattaaagaggttgtcaaggatatccaacgagcactcatccagtccgatgtgaatattaagctggtgctggagctaagcaagaagatcgagagcaggagcctggaggagaagccaccaaagggcatcacgccacgggagcatgtgataacaattatctacgaggaaatggtcaatctgctggggagtgaaaccgtggggctggacattaacgagagaccttacaagatcctgttcttggggctccagggcagtggtaagaccacgacaattgggaagctgtgtaggtttctgcagaagaaaggtttcaaccctgcggtggtatgcaccgacacatggagaccggccgcctacgtccagctcaagcaactgaccgaggaaatggacgttcccttgtatggggaccccgagaacaaggacgctcttgatctggctaggaagggcctccaggagtttaaaaacaggaaggtgatcatcttcgatactgccggccgccacaaacaggaggaggacttgattgccgaaatggacgaactcgatgatattatcaaccccaatgaggctatccttgtgattgatggaaccatcggccagcaggcaggcgagcaggcgaaagccttctcacaggctaccgacatcggatcaataattatcacaaagctggacgggtcagcaaagggcgggggcgccatgtccgccgtggcagaaacaggggccccaatcaaattcataggcactggggagcgcattgacgactttgagctgtttgacccggaacgctttatcagccgactactgggcatgggtgacataaaatctctcatcgaaaaggctgaagagaatattgacgaggatattgcagagaaaacaatgaccaacatgctcacgggtaaattcactttgatggatatgaaaaaccagttcgagatgatgaataagatgggccccatgcagcaagtgttaaatatgatccccggcatgggaaataagatcagcaaggaagcctcgaaaatgactgaagataagataggactgtacaaggttatgatgtcttccatgacggaggaagagatgctcaaccctaaaataattaaacagtccagagtccaaagaatcgcccggggaagcggggtggaagagagtgaagtcaaggaacttctcaaatattataacaacactaaaaagacaatgaaaggaatcggtaagcgtggcggtcgcctggggggcggcgcgatgaaccggatgatgggacagttcatgaatcggtga

SEQ ID NO: 10011 - DNA, 1209 bp, synthetic construct
  source 1..1209: mol_type = other DNA
atgtacgaactggccaaacagattctagaggaaaccggcggccgcatctgcaagaactgcctcggacgcaagctgagcaagacaattgaagggacaaacaatatcgagcgcgcagacaaggtctgcgttgaactgaatatctccttggacgacgtcgactgtgtaatatgtaacaacatcttcgataagcttaacgacaagctctataagaagatcaacgataaaattaatcagctgggcctggagtttgatacctttctcgtgggttcaaaggtgcccaaggatgtgcaagaacgggacgattgcctgtctgagaagttcaatttaccagtggagactatcaaaaaggaaatcaacagactgattgggctggaactgtggaagatctacgacaaagaagccgaatttgaaagtcaggatattgtcttcaacatcgacctcatagacaatcctaaagttcgaatccagatcaatccgctgtatattgagggaaaatacaacaagttcaaaaggggaatcccccagaccaagtggccatgtacgaaatgtaaggggaagggatgttgcgaatgcaacttcaccggaaagcaatacccggaaagcgtggaagaactaatttccgagcacatacttaaattgactaagggcaaggaggctaagttccatggcgcggggcgggaggacatcgacgtgctcatgctcggctcgggcagaccctttgtattggagatcaaagagcccaaaatccgcaagctcaatctcgccaaagtggaggacgagataaataaaatcaacgagggcaaaacctcataccacaatctgcatctgtgcaaacggaaccgaaaagccgagattaaacagtcttctcctgatacttataaagtgtacaacgccatcgtggagtgcgacgaaagattcgacgagagtaagcttgaggagctcctgaagctagatgagattcatcagcagacgccacttagagtcctgaggaggcgggctgataaggtccgtatcaagcacgttaaagagctgagctatgaaataattgacgacaagcactttagcatgcggatcaaaacagagggtggactgtacattaaggaattaatctccggggatgggggcaggagtcaccctaacgtgtccgagatcctgggtattaaggcaatttgtgagcaattggatgtcatagaggtgagcgagaagtga

SEQ ID NO: 10012 - DNA, 468 bp, synthetic construct
  source 1..468: mol_type = other DNA
atggccgaggaatttacgcacctcacagaaacaggagtgcatatggtggaagttgggggcaagccggatcagaaaaggcgggccatcgcatccggatcaatattcctcgacaagaacactattaacctgatccagaatgacgaaatcaaaaagggtaatgtgctgacaaccgctcagatcgccggaatccaggccgtgaagaacacaagctctattatccccctgtgccacccattggcactgaccggcatcgagctggacttcgatgtgaagaaggacgaaataatagctacgtgtgctgtcaacacccttgggaagaccggcgttgagatggaggcgattaccggggtaagtgtcgccctcctaactgtctgggacatggtgaaagcggtggagaaagatgagaatggccaataccctgatactcgcatcagcgacattaacgtcattaagaaggagaaaatctga

SEQ ID NO: 10013 - DNA, 162 bp, synthetic construct
  source 1..162: mol_type = other DNA
atggccaagaaagacaacaagatcagcatgccgcagaccggcgcaggactggtaaggtattttgatgaggaaagcctagggccaaaactgagtcccgagcacataatcgtggctacagtgatcgtcgcgattctgtgcttcgtgctccggtactccgcctga

SEQ ID NO: 10014 - DNA, 825 bp, synthetic construct
  source 1..825: mol_type = other DNA
atgctcactaagagaatcattccttgcctcgattgtgacttacaggtgcctgaggggagggttgtcaaaggcgtcgagtttaaagagatcaaatacgcgggaaatcccgtggatcttgctaccaagtactatgaagagggcgcagacgagattgtggttctcgatatcacggcttcccatgagaggcgggctaccatggccgacgtgattgacatgctcacagaaaacgtcttcatgccaatctgtgtcgggggggggatacgcaaggtggaggattacatcaagatgcttcgcgcaggtgctgataaatgcagcaccaacacagcggcaatcaaaaaccccgaactgctgaccgaggcttcaaaggtggtaggatcgcaggcagtggttattggaatcgatgccaagcgaagatacatcagcaatccagacgacgccccggataaagtcgtggtggaaactgacaagggcttctgctggttcgacagctccatatacggcggacgggaatttaccggcatcgacgccattcaatgggctcagaaatgccaggacctaggggccggcgaaatcctgttgacaagtatggacggcgacgggactcaaaacggatatgacatagagctgaacaaggcgattaatgacgccgtggatatcccagtcatcgccagcggtggcgttggtaagcccaaagatattctggacgtattcaagaagacggacgtgtccgcagccttggccgccagtatattccactttaaccagtattcaatcggagatgtaaagaagtacctgaaagataataacgtggccgtgcgtctgtga

SEQ ID NO: 10015 - DNA, 915 bp, synthetic construct
  source 1..915: mol_type = other DNA
atgatcattgaaagtcctatcgacttggaattaacccagatcagcggccagacctcacaacccccttggacgaaagttgacaactcatatagggaggtcgtcctggtaaacaacaaccccgtgatcttcgacgttgaacagtccggagaattttttaatttcaattacattggcaatatcagcaagaaagaagccgtatcttccctcaaatacatttttgatctcgagtttgacctgaacaagttttataagtacttgaacggccatgcagagctggctgagatgtccaagttctgccacgggctgagactattcttggccccaaacccattcgagtgcatcatctcatcaatctgttccgccaataacagcatcaaacgatggacaaaaagcatctctgatattaaggagaaatggggcatcaatcataacgggttccacactttcccagaaatctctactttccaagagatcttcctggacgccgaggaggagctggaccttaccgatgcaggtgacatttccaactgcaaaaacaatctcaagagctgtggggtgggataccgggcttcctacatgcgcaaagccagcgagcttttcagcctggaaatggacattagcgaaatcagtaaaatgaactatgacgaggcgttcgagacaatactgcaggtccccggggtgggtccgaaggtggccgattgcatactcctttatggattcaatttcagagaggccttccctagtgatatatggataaagcgcattgtgagttacctgtactttgacggcaaggatatttcggtgcccaaggtcagggaatttggcatggatgagtttggagacaatgcaggctatgtgcagctgtacatgtttcactacgcgcggaagtcggggctcatggctaagctaaagtga

SEQ ID NO: 10016 - DNA, 351 bp, synthetic construct
  source 1..351: mol_type = other DNA
atgaagatcaggtacgccacaatgatcgttaatgacatggaggagagcgtgaagttttacaccgaaaccctggacttcacggtggacgaggtcttcgatgtgccggaaggcaaaatcactcttctggacggggagggctttgcaggaattgaactaatcgagagttcaaacttcggcagcggcctctattccattggaatggacgtcgaagatatccacaaagaaatcgagaatctggaggccaagggggctaacattgccatgaaacccataaagatccaggtcggttacatggcgaaggtaatagatccaaatgggattaacatcgtgctcgtgcagcataaccggtga

SEQ ID NO: 10017 - DNA, 1377 bp, synthetic construct
  source 1..1377: mol_type = other DNA
atgaagctcgagaaaatcgtgctgatcgtagccacattgacatccttcttcaccgtgtttctgtccagcgctgtgatggtggcagttcccactctggcttcggagttcggaatgagcaatattatccaaaactgggtcaccatgctatttttcctcgcagtagctatttttaccatcccatccgggcagctgtctggcaaattcggacttaagaaaagcatgatatttggcagttcagtgtatatcctaagcagcattgccgctatttttagcataaacagtgaaatttttctcatctgtcgattagttcagggtatcggggtgtcctttctcaacgtcgctagcatggcaatggtcgtctccgctttcagcccacaggaacgcggtaaagcaatcggcatcaacgtcacgggagtgtatctcgccacatccacctcccccgttatcgggggatttctgaactttcatttcggctggcggagcatcttcctcacctccgtgccctttttaatcttgattctggtgctgctcataactgagatcaaggaggagtgggtgactatgggggatgttccgattgactggaaaggcagcattgtctacagtctgggcatactgctgttcatctatggattcacaaggcttgacgagagtaccggcattatcttgacggttataggtctcatcgtcctcggcgtcttcgtcgccctggaacttagggaaaaatacccggtattcgacgtgaagttcttcaagaatcctaagttctcctctgcgaacttcgccgccctaaccgcgtacctcgccaccttcgccgtgaccacgatcgtgaattaccacctgcagtacattcgcggttatgatagccagatggcaggcataatcctgctggtggcccctctgattcaagtgatcatggccccaatctccggaagactgtcggataagatcaacccccaaaaactcgcggctatcggaatgtttttcggcgccatttcacttgccatgcttagcatgctgaacgtttcaacacccttatggtttttgattatagcgatggtcagtcacgggctggggtttggaatattttcatctccaaacacaaatgctatcatggggtcagtgccccagaaggacacgcctgtggcttctgcctcagtggcaaccatgcgggtgatcggccagacaatgagtatggggatgctgaccctggtctttgccttcgtgatgggtaatgtaccaatgatcgagaagtacttccctctgttgattactagtagccagattacttgcctgatttgcatggtgctttgcgcagcctcggttttcgccagcctggtgggcatcaagagcaaggaaatgttggagttcaattga

SEQ ID NO: 10018 - DNA, 432 bp, synthetic construct
  source 1..432: mol_type = other DNA
atgaaagtcgcaaccattgagaccgataaagggaatatcgagctggagctcttcccaaatgaggcccctggaactgttgccaactttgagaagctaatcaaggaaggcttctatgatggacttacattccacagggtgattcccaacttcgtcatccagggggggtgccctaagggcaacgggaccggtggcccaggttacactatcaagtgtgaaacggaaggcaacccgcaccggcatggaaccggagccctcagcatggcgcatgcaggcaaggacacgggcggaagccagttctttataacacactccccccaaccccacctggacggcgtccacaccgtatttgggcaggtgatcaaaggtcaggacgtggtgaatgctattcgccagggcgacaagatgaacaaactgacagtggaagagagatga

SEQ ID NO: 10019 - DNA, 1161 bp, synthetic construct
  source 1..1161: mol_type = other DNA
atgaacactcaagaactaataaaaatagaggacgactacttcataaacacgttcacgagacagcccgttgtacttgaccacggtgagggggtgagggtgaccgatatcgatggcaatgagtacctcgacatgttcgcaggtattgcggtaaatagtttgggtcataataaccctaaactggtcaaggccatccaggatcaggctgcaaagctcattcacatctcaagcatttattataatgaacctgccctcatctacgctaagcggctgatcgacctgaccagcttcgaccgcatcttttatgccaacagcggggccgaggccaatgagggagctattaagctagccgtgaagtacaccggcaagagtgagatcatctcgaccgtggactcctttcacggccgaacaattatgaccctggccgccactggtcacgaagagtaccatgaaccattcaaatccataatgccgcagggatttatcaatgttccctacaacgacctcgaggctatcaaaaatgccattactgagaataccgcagctatcatcgtcgaacctatccagggggagggcggggttcacgtgcctgacgtggagtatttaaagggaatcgaggccatctgcagagaaaagggcattgtatttattgtggatgaggtgcaaacaggattcggaaggtgcggcacactgtttgctcacgagttattcgacgtcaagccagatataatgactatggccaagggcatcggtggaggagtgccaatggggggaatcttggcaaccgagaaaattgcgtccgcattcgtcccgggcgatcatggcacaacattcggcggcgggccactcgtctgcgcggccgcgaacgctattctggatgaatttgcagataaaaacatcttggacaacgttaacgaggtgggcggatacttcatttctgaactgaagaaactggacaaggatatcatcgccgatgtgcgcgggaaggggctgatgatcgggcttgagctcaccaaacccggggccgaatatgtggacaaactccggaaggcaggcttccttattaactgtacagccggcaacgtgctgcgttttgtcccccccctgataattaccaagacggacatcgacgagtttgtcgaagctctggatgaaattctgtga

SEQ ID NO: 10020 - DNA, 1284 bp, synthetic construct
  source 1..1284: mol_type = other DNA
atggatctgaatatcaaagtgaacgataaaaaccacctcgatattgggggcgccgacgccatcgatatcgcagaggaatttggcactccaacctacgtgattgatgagaacaggatcagagataattacaatagattttattcagctttctcaaagtactatcccgacttcaaggtgttctacgcgtgcaaggctaatacgaacctggccgtaatgaaaattctcgagagtgaagggtgctgtatcgacgcggtgtcccccggagaggtgcatatcagcaaaatgctcgggttttccggagaccggatactgttcacgggtaacaatattactaatgacgagttaaaatacgtgcatgacgagggcgcagtgctgaatatagactcagtctcggcacttaaccgcctgtctaagatgatcgaccctgaaggtgtcaaaatctcctttcgcgtcaacccaatggtaggtgcaggccaccatgaccactgtatcacaggggggataatgagcaagtttggcataatggagtccgaggctgttgaggtttataagaaggccgaaaagctgggattcaaccccgtgggcatgcactctcacattgggtcggggatcttggacccggaaccatttaagctggctatcgaaagtaccatggatattgccgggaaggtgcaccaggatgctggaattgacttcgaatttgtggactttggtgggggcgtgggtatcccctacacccccgaggagaacgttgtagatctggacaaattcgccgaagttaacgtcggactgttcaaggagaaacttgagcagtatggcatgggcaaccctacaatgtatctggagcctggacgattcttggtgggagatgcttgtgtgcttctcgtaacggtgaacagcctaaaacagagctacaggaagttcattggcgtcgatgccggtttccataccctcctgcggccggcgatgtacgattcctaccaccacattgtcgacgcaagcaggatgaatgccgagaatacacaaaccgtggacatcgccggcaatgtctgcgagtctggagacctgttcgcccgtgaccgcctaatgcccgacgtggaagagggcgacgttctcggcatactcaacgcaggcgcctatggattcacaatgtctagtaactacaactcccgacctctggctagcgaaatcttggtcactgatggggaatgcagcgtggtccgggagagagaaacctttgaggatttatatgccaagcagagtatcccaccacatctgaagtga

SEQ ID NO: 10021 - DNA, 861 bp, synthetic construct
  source 1..861: mol_type = other DNA
atggtagatctaaaaggcctgaaattctccaagatgcatggaatagggaacgattttccaattattgatgaaacaaagggaaaggtcatttctgaggaagacaaacctgaagcatgccgaattttgtgccaccggaacttcggagtgggtggggacggggttctgttcgtggagccaagcgatgttgcggatatcgggtaccgcatgttcaaccccgacggcagtgaggccgagatgtgtggcaatggcatacgctgctttggagactttgtctaccggaagggcatcctgaaaaaggagaagatgacggtggagacaagggcgggaatcaaaactatcgagatcacgctcgaagacgatgaaccggtcttattcaaagtggatatgggactgtcaaccttcaagactccggaaatccccatgatttcggagatggacgaatttttggattgtgagctcgaggtgctcgataccaccttcaacctgacagccgtgtccgttggaaatcctcacgccatcatctttgtggacgacctcgacgaaatcgacattgacaagtacggtccagctatcgaagcccatgaagtgttccccgagaagatcaatgtccactttgtggaggtgatttccaagaacgagggcaagatgagaacatgggagaggggcgccggggtcaccctggcatgcgggaccggtgccactagcaccgctataagcggctacaaactaggtctgttcgacagtaatatcctgctgcacctgcctggcggcgacctcaagttcaacgtatatgagaaagacgacgctcttggcgccttcatgaaggggcccgcagagcttgtgtatgatggggaattttga

SEQ ID NO: 10022 - DNA, 585 bp, synthetic construct
  source 1..585: mol_type = other DNA
atgccggactttaaaattaacatcgacgataacgtttatatccccgctgaagacagctacctgctggctgataacctccagatcaaaaaaggccaaagtgtgctggagatcggcactggaagcggcatcgtcgccatgtacgccagccgccttacagacaatatcacggtgaccgacattaacttcgatgcctgtgagcttgcatgcaagaattttgaagcgaacaacatcgaaaatattgagatattattcggcaacttgttcgaccccgtgcagaaccggaagttcgacgtaattctcttcaacaccccatacctgcctactgagaagggggaggtcctggatgacaccatcaattacgccttcgacggtggactggatggtaggaaggtcatcgatgcctttctgaatgaggtggggaatcatctcaacgacggcggaatcgtgcagatgatacagtcgtcactatccgataatgaagaaacactgaaaaagctcgacaagctggggttcatttccgagatcgcaaagaaagagcacttttttttcgaggatataaccttgattaacgcgtataagatttga

SEQ ID NO: 10023 - DNA, 873 bp, synthetic construct
  source 1..873: mol_type = other DNA
ttgaatagtgaaaattccatatccctgtctaagacaactaaaagcatcctgaatcagaatgggatcaagctgaacaagaatcttggtcagaattatctcattgataagaataagcgcgatcaaatcatcaacttcggcaacatcaatgagaacgatgtcatccttgaaattgggacgggaattggcacccttacgatcgaactggccaaaaaagcgaaaaaggttatagctattgagcaagacaagaacatatgtgacatactggccaaaaggctgaaagaagagaagatagacaatgtagaactcctcaacgaagatgccttaaacattgagtttccgaagttcaataaaatcatctccaacctaccctatcagatcagcagccccatcacttttaagttcctggagtacgacttcgacttagctattctgatgtatcagaaggagttcgccgaccggatgaacggggaggtgggcactaagaactactcgcggctgagcgccatgctccatttcaagtgcgacgtgaagaaactgacagatgtgagtagcgaaagttttattccaaagcccaagatcgactcaacagtggttaaacttaccccaaaaaagaataaaatctcactggaggattttaaaatctactccaagttcaccaaggcactgtttcagcaccgcaacaagaaaatcaggaacgcattgattgactctcgacacatcattaccaacctggacaaaaaggaaatgaaaaaatgcatgaacgagatcgaggatgagaagttgaacaattacctcaagaagagagtggtggtcgtcacccctgaggagattctattcctcagcaaggacctgaacagcattctcaacggatga

SEQ ID NO: 10024 - DNA, 633 bp, synthetic construct
  source 1..633: mol_type = other DNA
atggtggataacaaaaagagaaatgggaagaagccaacggtcaaaaaggagcagtatgcggtggtgctggattacctgagcagaggctacgttaagtccgatatgtcgaaatttggcggaaagccgattgctcaagctatcggtaccgagcagttcactctacttgagctggcacctaagaatggggtcgatttagagataggggacaccgtatttataggccagggcaagaaggacaagatctaccgggtccttgggcgcctcaacttcgaacgcctgacggccacaagtcgaatcgagctggattacacaatccgggacatcgtggagtcaaacgaggaaaaatatgttaactttttcaatacaactggagccgtgagcactaggctccacaccttggagctgatccccggaatcggtaaaaagtatatgtgggacattattaacgcccgcgaagaaaaaccctttgagagcttcaaggacataaccgaacgactcccaacactgaccgaccccgcaggaatgattgtcaaccgtgtgaagcaggaattggacagaaacgccattaaacggggcaagtccaagtactacatcttcacccaggtgcccaaaaaacctaggaatccaaggtga

SEQ ID NO: 10025 - DNA, 354 bp, synthetic construct
  source 1..354: mol_type = other DNA
atgatctccatgatcgggaaggaaattattgagagtgagccaataagcagcgccgaggtcaaaaaggtgcttgaagacttctccgaagacaatgagctgaactacgaacagaatatcaccttaaaccacttggcgcgcttcaagaggtatagcgtggaggattcagaggagattatcgaaaagctccaagaggaatttggcctacgggataaagtcgctgtacgaatcgtggatctcgttccgaaggacctggcagacctgagactgatcttcgccaaggaggccataaaaattgagaaacccgacatggagaagatcctggaactcctggaacagtacaacatcgaggagtga

SEQ ID NO: 10026 - DNA, 291 bp, synthetic construct
  source 1..291: mol_type = other DNA
atgcaacgttcacgcgggctgaagagtcggagccggaaaaaaatgacaaagacccagagacctgggcgaaccaatcccataacgaaccgcatgcagaggtttgaggacggcgatctagtgcacatcaccatcaacccaagcattcaaaagggccagcccgccccgaggttccatggtaaaacaggaaaggtgactggccagaaggggaaagcatacatcgtatccctcaaggaaggaaacaaggcgaaagagctgattgtcagaccagaccacctgaagctccagaagtga

SEQ ID NO: 10027 - DNA, 2319 bp, synthetic construct
  source 1..2319: mol_type = other DNA
atggagaggacttcagaactcggaaaaaatttgcatgagtcgacaaagatcaatgtcgagaaaaataacgggattaaagaaaggttcagctatgagaagctgttgaagtcactggtgatggttgagactcccttttttgagtccgacaagattgtggccacagtcgtgagccagttgtatgacggaatcaaaaccaaggaaatcaaaaagatagtgcacgaatgcctagaggacatcgattctgagattgccaacaagtatttagccagtacccgcctcaaagtgcggacctcgagggacaccattgaagcttttgacctgtccaagattgccaacaccttgatcgaggagacgggcgcaagccaggagactgccttcgagatagccacagaaacctggaaggagctgaaaaaattgaatgtcgaatacttaacggctcccatgatccgagagatcgtgaacactaagctcgttgaatatggcctggaggacctgcggagtcgttacacgcggctagggataccagtctacaacatcacaaatctaattgagaacgggaacagggacaacgcgaacatgattcacaatcctgagagtatccacaaacacgtggcagatgaagcactgaagcagtatgcccttctgaagatgctccctgcccacttggccgatgcacacatgtctggcgacatccacatacatgatctcgaattttttgcaggccgacccctgaactgtatgcaacacgacattcgcaccttcatcaagtacggcctcaaggtcgacgggaccggtgaccacacttccatcgccggggccccaaatcacatggagacccttatgaaccacacgggcgagatcatgctagccgcccagcagaatatgtccggcggacagggaatgtcactctggaacgtatttgtagcgccatttgcgcgcggcaggacctacgaagaaatcaagcaatccgtgcagatgctcgtttacaacctcaacatggcctatgcagcccgcggttcacaagtgccattcacaagcatggcgctcgagtttggggtgccggacttcttaaaggaggagactgcctacggtccaaaaggccaggtagttggaacctatgctgacttcgaagaggaaaccagactgattcagagagccttcaccgagacactgctggagggcgacaacgagggaaagccccatcttttccctaacacaatctacaccctccggaaggaaacaatgaccagtgagtacgaagaggatatcaggctggtgcacgagctgtctgcgaagtatgggagctcctactttgtcaatatgttccctaaatacagaggcaacatggccaactacatgggttgccgcacctgtcttcaggacacgtggactggggactgggatcaggactgcctacgaacagggaatcttgcatatgtgactctgaacctcccaagaataggctaccaatctaaggatgaaagtcaggtgttcgagtatctggatgaatacatggacctggcggtggagactctgatgcttagaagagagcagggactcaagtgcctgaatgatttccatatcttgcccttcctgaagcagcaagtcgctgaggatagctactaccgaatccagaatagcaccctgagctttggtttcgttggactgaacgagatgctgtcctcattgtttggggccggtattgaaaatgctgacgcaaacaagtttggcgtaaaatgcattgaatatattaatgatcgcgctaatcaactgaaagacgaaacgggactccggtggtctgtgattcagacccccgctgaatcgactgcttacagattcgccacgctggataagaagcagtatggtgatcaggctatcgtgcagggggagggcaatgccaactactacacaaacagctcccatgtcccggtggacacaggactgagcctcatcgagaagatcaaaatcgaagagcagtatcacagtataacacctggcggacatatcttccatgcattcatgggtgaatcatacagcgatccggactctcttatgtccctgaccaataagattgctaaaaagtccgatataggattctgggcttacagctccgcactgagtttctgtcttaaatgcaaaactctgatgaagggcctgaacaatgtgtgtcccacctgcggggaaaaagaggatgtcgaatggtatgaccgcatcacaggctacgtccagcaggtgggacgggctaaaagcgccagcggcggctggaaccccgggaagcggcaagagttaattgaccggaggcgttttgaggataactga

SEQ ID NO: 10028 - DNA, 3297 bp, synthetic construct
  source 1..3297: mol_type = other DNA
atggattacttcgataggctcgaagctgatacccatcacctatacgacatagctaataaggccaggtctcgggggctcgacgtggaaatagagacagaagttccccttgccaaggacctggcggagagagtggaagggctcgttgggcctgagggcgtggccaaacggattaaaatcctggagcaaaacattacacgggaggaggtcgcgtttgagattgcggcggaaatcgcttccggcaagtttgagcttacaggcgagaaagctaactgggataccgagcagcgctgcgaccaggggctgaggacggctctggccatcctgacagaaggggtggtggctgcccccctggagggaatctccgatgtcaagattaaagacaactttgacggaaccaaatatataggggtatactttgcaggcccaatcagaagcgccggaggaacagccgcagccctagcagtactgttaggggataaaattagacaggccatcggcattgatgccttcaagccaatcgatgacgaaatcgagagatacgtagaagaggtggaactgtacgagagcgaggtgacaaatctgcaatactcgccaacccccgaagaagtgaggtttgctgcaaaccatattcccgtcgaagtgagcggcgagcagactgacaaggtcgaggtctctcatcgggacctggaacgtgtggagaccaacaacattcggggcggcgctcttctggccatggtggaaggcgtgatccagaagagcaagaagattaagaaaatctcaaataagctgggtctagactggaattggctcgaggaatacagcaagcctaagaaggacgattcaaaggaggacagcggcgacagtgagattgtgagtgagcccaagtacatccaggacatcattggtggacgacccgtgctcggctacccctcggagaaaggggcgttccggctgcgctatggacgatcgagaaacactggtctggccacgatgggggtgcacccagccacaatggccttgcttgatttcctggctgttggaacacaactgaagatcgagtaccccggaaaagggaactgtgtggtgcccgtggacagcattgagggccctaccgtgaagctgaaaaatggggatgtcctgattctcgattctgtaaagaaagcaagggaagttaagaaagacgttgtggaaatcctcttccttggtgatatgctggttgcctttggagagtttttacgcaacaaccagaccctgtatccctccggctggtgtgaagaatggtggatacagctgttgatgagaagcgataagtttgatgcagagaacacggaccttgacttgtacaagctcgagtatgagtatttatcagctactgaagcatttaatctctctaaggagtacaacatccctctccaccctaaatacacctactgttacaatgatgtgaccatcgaagacttaaattcactgattgacttgatcgagaatggaaagagcacattcaataaggatgagggcatgaagctcgacctgtcctaccagaagcgtattttggagatcataggggtcccccacattgtacgcaatgataaaatcatcatcgataaagaccactcttatagcctgctcgaaacattgcccaaaaaactaccagaaaatgagaccacgatagaagccgtcaacgaaattagccctatcgagataaagaacaaggcgcccgcttacatcggtacccgtgtcgggaggcccgaaaaaagcaaggaacgcctcatgaaacccgccccccatggcctgatcccaatagggaataatggtggtagccgacgcctggtggccaccgcggctaaaaaaggcagcgtgaaagtagatatcagtagaagaaagtgtaccaacccagaatgcggcatcagttcctttggaagcctgtgccctaagtgtggcagcccaactgaggtcggaaaaccgagccaaaagacgatcccccttgctactatgcttaagaaggcctcagacaacgttaaggttaggcgggtggatgaggttaagggcgtcgtgggtatgattagcgaatccaagctcccagagccgatcgaaaaaggcatactgagggcaaaacatgaagtcttcaccttcaaggacggaactattcggcacgactccactgacttgccactgactcacttcatcccaaaggaaatcggggtgacagtggagaagctactcaagatgggttatgagaaggattgctacggcaacccaatcgagaatgaaaaccagatcatcgaactgaaagttcaggacatcgtcatttcagacaactgcggcgagtatctgctgcgtactgcccagtacattgacgacgagctggaacgctattacgatatggaccccttctataatgttaaagagaaaagtgacctgatcgggcacctggtcgccggcctggccccgcatacaagcgcaggagtcctcgggagaattgtaggctttaccaaggccctggcttgttatgctcacccgtacttccacagcgccaaacggaggaactgtgacagtgacgaagacgcagtaatgttgcttttggacgcactgattaacttctccaagtcatatctgccgaacacccggggaggaagtatggacgcccctttagtgctgtctagtcgaatcgatccagaagagatagatgatgagtcgcacaacctcgacatcttcgagcgcttcccggtggagttttatgaggagacgtacacccctcacaagcctgcagaggtgcttaagtacattgataatgtcgagatgcatttgggcaccccacagcagtatgagggacttatgttttcccatcacacctccagcatacatgccggacctaccgtctgcctctataaacggctccctagcatgcgcgagaaggtggaggcccaaattgctctcgcggagacgattcgagccgtcgaccagcgaggtgtcgtggagaaggtgttatcctcccacttcctgcctgatataatggggaacagtcgcgcattctccaagcagaaggttcgctgcccgaagtgcggcgccaaatatagaaggatgccccttactgggaaatgcaagtgcggcggtaatctgatcctatcagtgtccaaaggcagcgtgactaagtatctcgagatctcccaagagctggtgaacaggtaccctgtgtcccactacttgaagcagcggctcgaaatccaggaatttggtatcaactcattgttcgagagtgacaaaagcaaacagagttcgctggatatcttcttctga

SEQ ID NO: 10029 - DNA, 954 bp, synthetic construct
  source 1..954: mol_type = other DNA
atgagcaatgacaagcccattaacgctatgtacgggagcaagatgaagctcgacctggacaaactcaaaaacaaccgcaaaaaggatgacgaaggaaaagtcattgaaacaaagcacatcttggagggtagcgaagaaccagtggtggaggatgcacctgaggaggtcgtagaggagactgtcaaaaaggaggccatggaggaggcagttaaggaaaagccgtccaagaacgtggactccagtgtggtcgacagtctgaaagtgaagcttggcgaacgggagaagaaactgagcaaccagtccagcgagctgaactatttaaccaataagcttattcccaaactgaagaaggaaaatgctaatctaaagtccctgaaaatcgagttaaccgatgccctggagaagagcacaagaaagtacttcgaccagctggacattaacgccgatttgagtaataaaatcggcaaaataggggcggaaggcgccgtgaacaaggtaagggccgataaatttgaggctgaaatcaattctgtgaaagaggaattgcaggacaagataaaccagtacaaggaaaaactcgattcagttaacattgatgggctgaagaaagagaacaatgaactgtcatgcgaactgcgcgacatcaaaaccgaactggataagactaaaaaagaaaacatgaagctttcggaggaggtgaagtcactcagggacgagataatcgagatcggcaactacaagcaagaggtggacaaccaaaataagaaggagatcgaggagtataaggaggagatctccagcatttccaccaagctccggctgaaggaaagcagctatgataaactcttcaatgaatcgagtaaaacgatctcaaatctacgtaagcaggtcgcgaagctggaagaggacttggagaaggagagcaaccgaggactctttaacagattcaaatga

SEQ ID NO: 10030 - DNA, 492 bp, synthetic construct
  source 1..492: mol_type = other DNA
atgacaaacgataattacttcatggacgaggctattgtggaagcccagataagcttgaacgaagggggcctgccaatcggagcagtccttgtgaaggataatgagatcatttccagaggccacaataggctgatccagaacaacagcgtggttctgcatgccgaaatggatgtgctcgaaaaggccgggcggctcaactacgaggactacattaagtgcaccctctatacaaccctgtcaccctgccccatgtgctctggagcgttaatcctgtataacataccgcgcgtcgtcatcggcgagaatactaccctaatgggtgcagagaacctgctcgaaagtaacgacgtggaggtagtgatcctgaataatctggaatgtcgagagctgtttttgaaattcgtcaaagacaaccctggggtatgggagaaggagcttaaaaaggttggcaacaatactacggtgaagtacggagactattgtaacaaatga

SEQ ID NO: 10031 - DNA, 378 bp, synthetic construct
  source 1..378: mol_type = other DNA
atggagatcattgtaacgaatgaaatggatgaacggttcatcgagatatgtaactccttcgagtgcttttccgacgagccccaggtggtgctgctacttaacaatttcgggaaaattgtcggctgcgcgagcttcaaggtgtacgatgcagactcggccgagatcaccacattatttttgaactcacacgacaattgcgaaaagatagcttacaaactgattaggcagctcgagaagatcgccatcgactacgagtttaagagtatagttgtcaacttcgacagctatgaggatattctgatcgaaatcttcgagaaactggattataagttcatcgacgaactcctgatgaagaaggaatttaaaagcctcatttga

SEQ ID NO: 10032 - DNA, 1584 bp, synthetic construct
  source 1..1584: mol_type = other DNA
atgacacactggattgagaatgtcgccaaagagttagcagagcgggatgtagaggaacacgttattgccagcggcaccagcatctcaggctccatacacatcggcaactcgtgtgacatatttattgctaatgccattggcaagaagctgaggaaacttggcaaaaaagccaagacaatttggattgcagatgaccatgaccccctgagaaaggttcctttcccgctgccccaggactacgataagtacctcggtatgccctactcagtgatcccctgccctgatggttgctgcgctaacttcgtggaacactttgaaaaacccctgctctcagtcatggacgattacggaattgagatggagaccaagtctgggttcgagatgtataagaatggagtgtacaacgactacatccgcacaagcctcgaacatactgatgagatcaaggagatcttcaacgaataccgtcgcgagcctctcgcggatgactggctgccatacaacccaatctgtgatgaatgcggccgcgtgaataccacctatgcttatgactttgacggggacataataaagtataggtgtgaatgtggccacgaaggggagatggatattaagagcgggaacgggaaactcacgtggagagtcgaatgggctgcccggtggaaaatctttaagacaacatgcgagccgtttggcaaggaccatgcggctagcggcggatcatacgatgtgagtagcataattagcgaaaagatcttcgactaccctgcaccttatccggtaccctacgagtggatcaccctcgacggtgaggccatgtccaagtctcatggagtcttctttgcccctgaagaatggcttaaaatcggacccgcagagtcccttaactattacttatttagatccaagccaatgaagagcaaggatttcagtccaaagatgcccttcctggactttatcgaccagttcgacactgttgagaaggtgttctatgatgaggaggaagcaccgtctgaaaaagaaggtaagaaattcaaagagatatatgagatcgtgcagatcaacgaggggagtcccctcccattcaggccctctttccgcttcctagtgaatgcctaccagattgccggaaatgacctggaaaaaatctatggcattctgaaacgaaacagccagctgtccaagagttttaaggacaaagagtttggggacttgacggaggccgagctggcccagtatcgggaacgggtcgacaatgtcatctactggctggacacttatgcccctaaattcgtaaaattccaagtgcaagagaagaacatccctaaattgccacttaccgacgagcagaccaagtttctgactgatctggcggacctaatggaaaacaatgagtttgcagaggctacgcaattgcacgatgccatgtacgaaatcctggaatcgcaggagctgaagccacaaaagggattccaggctatttacaagatgatcctgggccagaagcaggggcccagggccgcgtccttcctattgtccctggataaggattttgtggtgaaacgactcagacaggaggcttga

SEQ ID NO: 10033 - DNA, 1338 bp, synthetic construct
  source 1..1338: mol_type = other DNA
ttgactgttctgaaactgatcggactctggtgcgacaaaatgacgcagattagtgacgcccggaaaggcatactgaccgaagagatgaagcatgtagccaagatcgagaatgtgagcgaagactttatcctgaaatcagtcgctgaaggtacaatagtcataccaggaaatgtcaaccgagatgtggaagctgcagggatcggggcaggcctgagaacgaaggtgaatgcaacagtgggaaccagcacagatatcgttaacttcgatgaggaggtgcagaaagcaaagatcgccatcgaccatggggccgactgcctcatggaattgagtatcggtggagaccttgatgagatccgccggagggttctcgatatgagcccgctaccagtagggtccgtacccgtgtaccaagcctccattgagagtattcgcgagcatggcagcgtggtggacatgactgaggacgacctgttcaatgctatcgagaaacaggccaaggacggtatagacttcatggccatccacagtagcatcaacattgagactttaaccaggctaaagcgccagggcagagtcacgggcctggtatcccggggcgggtcctttatgtccggctggatcgttgaaaacgagaaggagaatccactttactccaactttgattatgtgctggaaattgctaaggagcacgacgttgtgctgtcactcgccaacggcatgagagccggatctatagcggactcaaccgacagggctcagatccaagagttgatcattctcggcgagctgattgatcgcagccgtgaagctggcgtccagtgtatgatcgagggccctggccacatccccattaatgagatcccaaccaacgtgatgattcagaagaagatgtgtagcaacgcgcctttttacatgctcggacctattgtgtgtgatgtggcaccagggtacgaccacattgtgagcgcaataggtgctgcctcgagcgcaaaggccggagctgacttcatctgttatgtgacacccgccgagcacctcgctctgcctaaccccgacgatgtgagagaaggcgtcattgctactaagatcggagcgtatgcgggggacctggccaccgggcaaatcgatggtagccaggatttagccatggccgaggcccggaaaaatcttgattgggaagcccagtactcatgcgcaatgttccccgaggcggcccgggccaagagggaccagcgacccccggaggaagaagacacctgcacaatgtgcgggaactactgcgcagtcaagatcgtcaacgaatggctggataaaagcgattcggacctgattaaatga

SEQ ID NO: 10034 - DNA, 915 bp, synthetic construct
  source 1..915: mol_type = other DNA
atggcaaagaacagagaccttctagcgatcgggcactccgctcatgactacatcattcgagtgcccgagtttccaaaagctaacttttcggccccaatcacaaacatgaagaccttcaatggcggcgccgctgcaaatgtggcctgcgtgggcgccaagctgggcctgaagaccagcctggtttcagccgtagggggcgacttcaagaaaacggaatattacgagcacatgcagaatctggacatcgacacggattctttgatcattgtcccgggtgagagcacccccacggcatttgtactgactgatgataatgaggaccagatcagttacttctactggggggcggctcgtgagtttgccgaaagcaaggtccccgcctctgccattaaaaacaccgaagccgtgcatctggcaacaggagaccctaactttaattggcgctgcagcgaagaggctaaaaacgaagagctgctcgtgtcattcgacccaggccaggacctcggaatgtatgatataaaaaagttaagggatgtgattgagaacactaccatcctcttcggcaaccaccacgagatcggccgcatcctagaatccctcgaagtggatttggacgggctcaggacacttgggcctaaaataattgttaaaacctgcggggccaagggaagtgaaatctacagcaacgaggacaagataaagatcgatgccattgagacagaggtggtggaccccactggagctggagatagctatcgggcgggattcctgtcccggtttctgaatggtgagtcgctggaagcatccgccaagttcgcaagcaccgtctcctcattcattgtcgagcaccaaggttgtcagacaaacatgcctactttcgacgatagtttcgagagaatgaatcggttttactga

SEQ ID NO: 10035 - DNA, 867 bp, synthetic construct
  source 1..867: mol_type = other DNA
atggagttcgagtcaaaagggctaataagcctggagatagagggcgaggtgtatggctataagctctatgagagccttgactcactaactaaaactaagtcccaaaggaagtctgcaaaggaactcaacatttcccacacagtcttcaaccgccgcatccttcgagcggagaagaaactgggattcaagctgacggaaaagctgggcaatggtaccgagctgaccaaagagggattggacctgttagaggaatttaaaaagtacgccatccagattgaaaaaactcccaccatcaacatcgttggtggccatatatcgaccgggctgctggaaagtatcgaattgccgttcaagaccaatatttacagctccaacgatgaggacgcttttgagcttgctaagcggggcgtagtggatatcctcacactcgatgatccattaatcgcattcgaaagagacatcaacttctaccctatagcctacgactacctggtgcttattagcagtcccgactctgagaaaattgagtccatctcagacctggagaacctcgattttgtcagtgtgtctggatctgcccaaaggttggcctggaacagtctgaagcactacgacatccacgtgaatattaaggagaacgtctcctcgcagttcgacgcgtataagaaagttcggaacagcaagaacctgcatacattcctcaatgcatcctacttcaaggggaacgagttgctgaaatttaatacccagcacgtcatcagcctgatcaaagtgaatgaagataaggccaaggtggacgagtttatcaaatatctcacgaatgaagcccaggaaagcattgaaaagcaggggtttacaccaatgtga

SEQ ID NO: 10036 - DNA, 591 bp, synthetic construct
  source 1..591: mol_type = other DNA
atggagattatgaaaacctcaatcaaggctatattggacaacattaagaacgccgaggacttcctggatgaaaaggcaattgacgaatttgaaaacatcatcatcggcagcaagaatatattcgtgactggtgctggacggtccggactcgccgctaaagccttcgcaatgcgcctgatgcacctggggctgagtgcctatgtggtgggggaaactatcagccccgcgatctacgaggatgactgcattatcgcaatcagcggctctggtgagaccaacaccatcgtttcagccgtaaagatagccaaaaacagaggctcgaaggtgctcgccctcacaagctatccggaatccagcctgggccaactagcggatgcttacattctggtgaaaggacgaacgaaaaaagaagtggacgacgagaattacatgaagcggcagatccacgggaattacacctctttgacaccactcggcacggcattcgagcttacaactttagtctttctggacgcgattgtctccgagcttatggagaagatgcagcagaccgagagtgatctgaaggccaggcatacagtcctggagtga

SEQ ID NO: 10037 - DNA, 750 bp, synthetic construct
  source 1..750: mol_type = other DNA
atgaaaatcgagaaggtcaacgccataaagtacaaaaacaaccagcacgaggaggtgaaagagaatgtggttaaagatgagactatcaccctcacaatcaatggcgagatcagccgcagtctcagcgcaattgaagactccctgaaagagtttgctgtgggctaccttttcaacgagaacatggtgaagtccctagaggacattaaaaagatagaaattgacggtgtgcagatcaatgccgaaattgacgataccttgctgaaaaccaacgagacggtcctgtgttctgattcagccgggggctggagatcgaagatcaaagaagtgaaccctgtggaatctgacctgcaggttaatgtgaaggaactgctcgatcggatcgaggaactgaagaataatgctgagatatggcaggctactgggggaacacatgttgccggcattgtccacaacggacaattcgtcgtcaaggaagatgtcagtaggcacgtggccgttgacaaggtaattggatatggactcttaaatggtttcaacttgaaccagtcctacgtaatttacagcgggagaatgccggctgacatggtgatcaagatgagcagggccggcgtgcccatcctggcaagcaacgcagcgccagccaattcaggctataacatcgcgaagaaggggaatataaccctggtggggttccttcgaggccagcgctgcaacatctataacaaccaaaatcgggtaatctttgactga

SEQ ID NO: 10038 - DNA, 570 bp, synthetic construct
  source 1..570: mol_type = other DNA
atgaatatagatgattacgacgagcagctgcagcgcgcagtggagtttcatggcgaactttgcggaggcatcgcgatcggaaccaagctcgggatgtacggtctcgagctgttgggcatggagctgaaccagaggcataagaacctgattgtaatcttagagagtgaacggtgcacatccgacgggattcagagcgtcacgaagtgctccattggcaaaaagagtctcaagctagtgtattacggaaagttcgccgccaccttctacaacatggacaccggggaggcataccgagtgagcgatgctgacgccaacaaaaagaataaatcgaatgagacaaaggacgagctggtggaacgctttcggataactccccccgaagaacttttcaacgtcgaaagagttcacgtgaagcctttcaaaggggctcaaaaaccggggggtaatcacaaaaccagatggtgtagcgtgtgtggcgaaaaggtcactgatgactaccacaagctgagggccggcaaaccaatctgcgagtcttgtgccaacggatcatattatgagatcatcgagtga

SEQ ID NO: 10039 - DNA, 804 bp, synthetic construct
  source 1..804: mol_type = other DNA
atgagctcctttaagagtccagtggatacggccaaggcaatatctaagacagctggagcaaagaacagcgcaaatatcgtgaatgttatattgctctcattcctggccggagcttacattgcctttgggggtctcctagcaatcgtctcgagcgccgggatgatcaaggccggggcccccttgggtctggagaagttcgtctttggcgcagtgttcccggtggggctgattatcgtggtgcttgccggaagcgaactgttcactggaaatgtgatgtttatggtgatgggggttctggatggatcagcttctattggcggactcgcgaaaaactgggtactcagctgggttttcaactttgtgggggctctattcgtggcctatgtgatagccttcatgggcggcctgtgccctacagacgcctccgtccctgcctacgcgataaccgctaaagcgattgccgtcgcagaaggcaaagttactatgcccttcacagtcgctctgattaaggctatcgggtgtaactggttagtgtgcttggctgtatggctggccaatgtatccgacgacgctatcggtaagattgtgggcatctggtttccaatcatggccttcgtcacccttggctttgagcacagtgtcgcaaacatgtgtttcatcccactggggatgttcctgggcgcgaaaggtgtcacctggactacgatcatcgttaacaatctgatccccgtgaccattggcaacatcattggcggcggactcttcgtggcctgcatctattggtacacctttcttaaagagtga

SEQ ID NO: 10040 - DNA, 2166 bp, synthetic construct
  source 1..2166: mol_type = other DNA
atggtggagatcaagtatgtgccaacaatctgtccatattgcggcaccggctgcggactcaatttcgtggtcaaagacggaaaaatcgtgggtgtggaaccgctaaaaagaagcccggtgaacgaggggaaggtatgccccaagggaaactttggataccagtttatcaatagggaggacaggcttaccacacccctgataaaagagaacggtgaatttcgagaggccagctgggatgaagccctggacctcgttgctaacaaactcaaggaggtgtcagatgaagatcctaataaagttggattctatgcctgtgcccgttcaccgaatgaaaacatatacattacccagaagctggccagggtggcctgcgggacacagaatgtcgaccactgcgcccggatatgccatggccccaccgtggccgggctcgcaaatacattcggcagcggggcgatgaccaatggtttcgacagtattaaggaagccgattacattttctgcattggaagcaacaacatggaggctcatcccctgtttggacggaagatgatccaggcgaaggagaatggggctaaactggtagtgttggacccacgatttactcctacggctaaaatcgccgacgagtatgtccagtttgagactggcactgacgtcgctctgatgaatgccatgattaaagtcatcatcgacaaagacttgcaagacgatgagtttatcgcaaacagaaccaagggttacgaggagatgaaggagactgtccagaaatacacactggacaaagtttctgaaattaccggtatcaagcctgaaactattgagcacttggctgttgaatatgcatccgcggacaaggcagctattgtgtacagcctgggcatcaccgaacactcccatggcgctgataacgtgatgtccactgccaaccttgctatgctgacagggaacataggtcggcagggtaccggcgtgaacccactcaggggccaaaacaacgttcagggggcgtgcgacatgggggcactgccctctgactacgtgggctaccgcaaggttaaagaccccgaaaccacggcatggttcaatgactactacagtggagatggctatgaggtgaacctgccaaccacacccggcctgacgctagtggagatgatgaatgccgctcatgccggggacctgaaggtgctgtatatccatggggaagatcccgttctctccgatgccgatgtaaaacacacaaaggaagcccttgagaacttagaaatgctggtggtgcaggagtgtttcctgacggacactgcccagtgcgctgatgttgtgttgcctgccgcagggtggggggagcaagaaggcaccttcaccagtggcgagcggagagtgcagtgcttacataaggcccaggaacctccggagggcgcatggcttgattggaagatcatggaggagattgccgtccgcatgggagtacctagatcgctgttccactacgagacttcagaggacatcttcaatgagatcagggagtgcgcccccatcatggcaggcatgaaccgggagcgtctggacacgcccgaagcacttcactggccgtgtccctctgaagacgacccatgtcagccactaatgcacaaggaaaaatttgctcaccccgatggcctcggagttttccaagccctcgagcacaagggacctgtggaaacaactgatgaggagtatccactggtcttaaccacaaccagggtattgttccattatcacgccgcaatgacccggagatgtgagacactgaataatgaagtgaagactggattcatcgagatcaacacgaaggatgcggaagagcgcggcattattaatggtgaagtggtcagagcctactcgcgccgcggcgagatcgctatacctgcccgggtcactgatgacatccgagaggggattgtgaacatcccaatgcactttgtcgaatgtgctgcaaacgtgctgacgaactccgatagcttcgaccccaaaagcaagatggtcgagctcaaggcctgtgcgatcaacgtggagaaactccctgagaaagtagtcatgcgcggagaagtctacaaggacgggacagataccgaaattaaggctgagaacatggcgaccaccaccataaaggtgggcaagtga

SEQ ID NO: 10041 - DNA, 1206 bp, synthetic construct
  source 1..1206: mol_type = other DNA
atgagcgccaaaataaacgacatgtattatgcatactcagcgatcgaagatatcaaggaaaagggagagtacggcggagtcgtgaccactatcatgaagtaccttcttgaggaagggatcgtggacggcgtggttggggtcaccgagggccatgatatgtatgatggtgttccaatcctcgtgaccgaccctgccgatgtaataaaaactgctggttcggtccactgcggcaccctgaacatcgccaagtttgtgtcaaagtacctggacggtgcaagagacatgaagctggctgtggcatgcaaaccctgcgacgccatgaccatccgcgagctgatgaaaaaggggaagatcatcgaagataatgttatcatgattggggtgaactgtgggggcaccttcagccctgtgcccaccatgaacatgatcagagatgtctacgaattagatcccaaggatgttatcaaagaagaaatatccaagggcaaactcattatggagaccgccgacggcgaaaaaggaattgccatcggcgagctagaggagcagggcttgggcaggcgagaaaactgccagcgctgtaatctcaagattccgagtaatgctgacatggctctgggtaactggggcgttattggtgacctggcgggaaaggcaacattcattgaagtcttcactgagaagggcgccgacgctcttgggaaggtgatcgatgccggcctgattgccacagaggaacctctggagaagggaatcaaaatccgggagaatataaacaacttcatgctcaaggagtccttggagaagaaggatgtggactatgccgggacaacgggagacattattgatgtgtttcacatgtatgaggacgagtttagcaaatgcatgaagtgttacgggtgtcgtgaagcatgccctctgtgttactgtgatgactgctgcctcgagactgaggggcccgagtgggtacccggcggatatacgccagcagcgcccttcttccacttgacacggctagtgcacatggtggacgcctgtacgaactgcggacaatgcagtgaggtgtgcccatgtgaaataccggtcgctaaggtatggagcattgtgaataataaagtcagggacatctacggatacattcctggtatggggagcgatgacccactgccatttacagaccatgtctccaaagccaaatggatctga

SEQ ID NO: 10042 - DNA, 936 bp, synthetic construct
  source 1..936: mol_type = other DNA
atgctgaagaacgtcgtgaaagataaatacgagagaccgatcctgtcactaaggatcacaataacaaaccgatgcaacgagaactgcatttactgtcatcacgatggcatggtgagctcaaaggatgagatgacccccgacgagctgtataagatcagcaagatcgccaggaaaattggggttaaacgcatgcgcctttctggcggagatcccttggtccggaaggacatagtggagattgtggagaaaatagcaagtctggattttaacgacatctccttgactacaaacggcgtactcctcgaaaagtacgccaagggcctgaaggacgcggggctggacagggttaacgtgtccctggacaccctgaaccgcgacacctacaagtatgtcactaacatggactatctaaatgaggccaaaagcggtatcctgaaggccgttgaggtcggattataccctgtgaagatcaacatggtgatcatgaaagatgtgaacgtccacgaaataaaggatatgtttgaattttgcaaagagcacggaattatcctccagttgatcgagctcatcgaaagtgagaattgtgaggacgataagttcagtgctgaacatcactacagcctcgactccctggaaaagaagctcacggacatggctgacaaagtacacgaacggaaattcatgcaggggcgtaagaaatattacattggggagggtgagatcgagattgtgcggccagtggacaatgccaagttctgcgcatcttgttcccggctgagaattaccccagatggcaagattaagccttgcttacttagaaatgataatctggtggagctgatcagccatattaggaatggaaaatcggaagaggaacttgaagaactcttcatcaatggcatcaataaccgagaacccttcaacaaggaggactga

SEQ ID NO: 10043 - DNA, 1038 bp, synthetic construct
  source 1..1038: mol_type = other DNA
atgaaaatcgtttctatagtgggacgcaagaataccggcaagactagcctaacagtgaaaattatcgaggagctgacaaagaggggctacaatgtcgccagcatcaagcatagccaccactcgatggaaatggacaaagaaaataccgacacatggaaacacaagcaggccggaagcaatgtggtcgtggggatcgggtcaaccacgttcttcaatgcccggaaagaaatggacctcaatagattgctcttcctgataaaacacatggaccccgtcgacttcgtggtcattgagggcttcaagaaatataactacccaaagatcgccaccagccctgacgtagtcgatgagtacaccattaaggagataaattcctttactatcgatgataaaggtctgaaggaactcgtggacatcatcgaggaacgatcccatgacatcgtcgatacactgtttgcaaataattgcggatataacaacggggagaatattgcgagtgagatccgtgagggcaacctgacggtggatgaactagataacgtgcacagttacctttcaattgataataaggtagtggggctgaaccggtttgtgagtgatttcctcaagcaaaatgtgcttggtgtaataaacaccttgaatctggatgactataacatcgagaagataagcaacattgaactgatcatccccaacgaggtcgacaagactccgattaacgctgaatgtacggttttgatcaatggcaacaatctcaaaatcaacaacttcgcaaagaaccttgtggccaactccattaagggaatgattaactccatcaaaactgaggacaacgctaagatgatcgacatcgctattagcaatatcaagaacaatgaattaaagaaagcgaccatcaacctgaaggtgaacaaccataacgttgaaattaacagatttacacagaagatactcaaagagaccatttttgcaattgttaacagcctgaggatcaacgaggagattgccgagctgcgcatcaaagtggaggaacggtga

SEQ ID NO: 10044 - DNA, 450 bp, synthetic construct
  source 1..450: mol_type = other DNA
atgccgaaacacatcgcctcggggctgaagtatctcgctgcggtcaagctaaagatggcggggaaaagtcaccaggaaattgctgacgagctgggcgtggatcgatccacaatctctcactacctgaatggacggaacctgagctggaacagcattgatgtagccaggacaatcatcgacctctgccccaaggatttcctgacgatgaccgaggccatatttaacaaccctgaacagagtcggaaaattgtgaacatctgcagagagcgcaacttcgaagcaaaggtcgaggactcctgcatcggatgcggcctgtgtgtgaatgcctgtaccatgaaagctatcaagttagaatcactcaaggcccatgcagactccatgcaatgctgtggctgtcagctttgcgaggacgagtgcccaactaatagcataaaaattttggagatctga

SEQ ID NO: 10045 - DNA, 1098 bp, synthetic construct
  source 1..1098: mol_type = other DNA
atgattagaaatctcaaggaggtgaaagacaataactttgacatcacaaggtccgcagacgaagttcgaaacttgagcttcaatgaccatgtctgtttaggttgcgggatctgcgagtcgacatgtcccgtggaggcgattacactcaatgccgttgctatagacgctcgtaacaggctttcaaacgacatctatttcagtgggcacgagaagatcgcccaaaacttccgggaggattttgatgtgcagcgaataagcattgacgagagtaagtgtgtgctgtgtggtatgtgcagcggactgtgtcccgtggacgcattggtgctgaccatcgatgatgtgccaattcgcgagatcgaagcatatccacactacaatgctttcagcgagatcgatgatgacgagtgtatctactgcaaaaggtgcgagatcgcatgccctcgggatgccatcgtgatcgagcgcgttctgccagaccgggctgacctggtcactggagagatcaatgtcgacgacgatgaatgtatatactgcggcatatgcgaagagctgtgtcctgccgaggccattgtggtggaccacgaaacgggcaaagaatctatcgtgatcgacaaagataaatgcgtctactgcctggtctgcaagaagagctgccctaccaatgcgatcaacgcaatatgcagactatgtaactatggagaatatgatcttgacagctcaaaaagcgtggtgaaggggaactccatcattgacccagacctctgtgtctactgtggatggtgcgagggcgtctgccccaccgatgctgccaaagtgaaaaagccgtttaaggggagcattgaagtggatgatgaaaagtgtcaggcttgcggggcctgcgtagatatttgtcagtgcaacgctctggccttccctgtaagtactggccccggctcccgcatggcgcatgttgttgccaatgacgactactgcgtacggtgcaaagcctgtgcaaaggcctgtcccaacggcgccattacggtcaagagaaccgaagtggaccacactccgatcaactccgcgacctggaaggaggccctcgatgccattaaggactga

SEQ ID NO: 10046 - DNA, 231 bp, synthetic construct
  source 1..231: mol_type = other DNA
atggagctgaaggtgaatcaggacaactgtctaggctgcgggatttgtgtaatcgcctgtcctgtcaacgccgctatcagcccggagaatgcggggggaaacggcgcaaagacagaagaagtcattatgatggtggaaaatggcttcatcaaactcttcagccccgagaaatgcgagctgtgcggaacctgccagatgttttgcccagtgaacgccatatggctggagtga

SEQ ID NO: 10047 - DNA, 570 bp, synthetic construct
  source 1..570: mol_type = other DNA
atgtattatgccaatacgtatttagaaaagcccgtcgtgccagacgtcaaaatcaccggtgaaggaaatacagaggtgctcaagtgcatgctgaacacgggaagcgacatataccagggcgcctgtaagaagagaggcagcacattgaagcaggagtacaaaaacgtgtccggcacctgctacatggaccctagggatatggcgaagctgggcgtaaacaattgggataccgttcttgttaaaacagattttggggaagtggtggtgaactgtgcagtatcacgagatgcaccacacgaggggacagtgttcatctgcaaaggcccgtgggctaacactattgtcagtcacgacacttactgctgctccgaccccacctacaaggggattaaatgtaccgtcgaaaaaactgatcggaaggtgctactcatggccgatctgatgcgctgggtctacaagaagtacgtggacgaggaggatgacgacgtggtggaaaacatggagagcctgggtgagctgcccgtttatcatggacggaaatgggaggagctcatcgaccacgacctgtga

SEQ ID NO: 10048 - DNA, 1377 bp, synthetic construct
  source 1..1377: mol_type = other DNA
atgacatatgagccacctgtgacggattatgaccacattgtggaaaattgtacgtgtgcattttgcgggtgcaactgcgatgacttagattacctggtgaaagataaccatgtggtggccgttcgccacgcctgcaggctgggagccagtaaaatcatggaggacatggaccagagactgcttgtgccaatgattagggacgagaatggcgagctcactgaggttgactgggataccgccctggataaggccgccgagtatatcgccaattctatccgacctgtgttctatggttggtccgaaacgagcacagagtgtatgaaggaaggcgtagccctgggtgaatacatcggggctgtcctcgataaccaagccacaatctgtcacgggccctctctccaggcggtgcagaacgcaggctaccccatacagaccctaggggaagtgcaaaatagggctgacatgattgtttactccggctcaaacgcgatgaatagccatcctagacatctggccagatatgctgctttctgccggggatacttccggcagaggggacggtttgaccggacagttgtgaccatggacccgaagttcagcgacactgcaaagtgctcggataaatggatcggatttgagcagaatggggactacggtttttataacgccattagagccgtccttagaggaaaggaactgtaccaggatgtcataagcggcatccccaaggaggatatctatgagttggcagaggaaatgaaacaggccgaatttggggtgctctttttcggcttagggctaacccacaccctgagcaaacagcgaaacattgacatcgctatcaagatggtccaggacctgaacaaatactccaaatggggacttactcccatgcgaggccacttcaacgtcaacggattcaacattttcatggcatttgagtgcggctttgctttcggtgtggactactgccgcggctacccccgctacatgctgggcgagaccaacaccatcgatctgctggtccgcaaggagcccgactgtttcatggtgattgccgcggaccctggcgctcacttccctaatggagcaaaccaacacctggccgacattcccgtgatacagatcgatattcattgggggccatccactgaactcgctgatgtcgtattgccgggttcattcatcgctgttgaatgcgacggcaccagttatcggatggatggggtgcctatatacatgaagaaggcaatcgacaagccggagacatgtcgtgacgacgagtggatcgtccgtgagttgaaggaaagggtaatgaaactccgcgaagagcccaatgtagcgccaaagtacgtgccaaatccaaacgccctctga

SEQ ID NO: 10049 - DNA, 1716 bp, synthetic construct
  source 1..1716: mol_type = other DNA
atggaatatattcttaagaatgggatcgtctacgaccccgccaatgagataaacggtgagaaaaaggacgtcatgtttaaggatggaatcatcgttgacgacgtctcctcagatgccaaagtcctggacgtgaccgacaagatagtcatgccggccgggattgaccctcacgcccatatcgccggccccaagctcgttgtgggaagattgtaccgacctgaggattccagacggggcgtgacacaaaaaaccaaagtgctccggtccgaaagcggtttcagcatcccaagttgccccgcaactggctacagatactcacgactcggctacgggactgtggttgaggcagcgatgcccccccttgaggcgaagcacacccacgaagagatcgctacaattcctcagctggatatccccgctctcccactgttcggaaacaactggtttgtaatggaatatgccaaagataacaatatcgaggacatcgcagcttttgtggccgcctggctgaaaatcagcaagggctacggaattaaaatcgtgaatccctgcggaagtgaagcctggggctggggcatgaatgtccatggggtgaatgataaagctccctattttgacgtaacgtccaaggaagtggttgtggctctggccaaggccaacgagatgctgaacctgcctcactcgattcacatacaccccaatgacttaggacacccgggcaatgtcccaacaaccctcgaaacaatggatgcagttaaaaacattaaaaagggttctaaggctgcggaaatcagggaccaagtgatgcacctgtgccacctgcagttccatgcatatactggtaactcgtggaaggatgcggccagcggcgcagaagagttgactaagtacattaacaaacatgatcatgtgacatgtgacgtagggcagattacgttcgacgagaccaccaccatgaccgcagatgctcctatggagtacgacctgttcaagctgagcggtttaaagtggacgaataaggatatcgagtgtgagactgcagccgggatcatcccatgtatctactcacctaagaatcccgttaatacactccagtgggccataggccttgaattgttccttcaaattgaggacccatggaaagtgtgcctaacaacggaccaccccaacgcaggcccgttcacccgctatcctcggatcatctcttggctgatgagtaaccagcgcagaatggagatgatcgaaaacagggaagtgcacaagtgggctgaaaagcgcacgaccctggccaccctcgacagggagtatgatttctatgacattgcgactattacacgctccgctcctgccaagatctacggatttacagatcggggcgccctaacccccggctacagggccgacatcgccgtgtatgatatcaatcctaatgagattgacccaagtcggcaggctgctgacatcgagaaggggttcaacatagcggactacactattaaagacgggcagatcctggtaaaagataaagagattgtcaaggtgaaggaaagccagaacatgtgggtgaacgtgaaaggatgggagcagaacgagcagaaggtgattgataacataatgccgttctttacccagtattacagcgtcaagtgggagaactacccagtccatgaccattacgtctccaacccaatccgtatagacgtggatgggaagtga

SEQ ID NO: 10050 - DNA, 867 bp, synthetic construct
  source 1..867: mol_type = other DNA
ttgaaaacaataacatttgatcagataaagaccagctcaatcgctttagagtttgatgaggtcattcctgatgaaattttttcctggaccgaggctgacttcgcaaagtaccaggttcccatcggaaattcacgcttcccaattactgacttcttcgacattaccgtggagggggacgctgcgggcccagatgaggtcaagatgattctcaacggggatctcaacagagtgaaatacatcgggtgcaaaatgagtggtggcgacatcgtctgtaactccagcgtagatctgcatgtgggtgcagagatgagcggcggaagtattctggttaaaggcaatgcggccgcccatgccggaagagagatgtccggaggatacctcgaaatcgaggggaacactaaggaatttaccggggcctcttacatcggcgagtggcgcggaatgacaggcggacagattgtggtgggcggcaatgccgggaagcaatgcggcgaatgcctgaccggtggacgaatccacgtaaagggcaattgtgacatcctggccggtatccacatgacgaaaggtattatcgaaatcgacggtgacgtcaaccggtggcccggcggccagatgaagaacggcaacatcattatccacggattcctaggacggctgctcgaaggtttcgtgctggatggggtggtggagaacccggaaatcgaggggacgactttcgaaggcaagtatataaagtataccggagacataggcctgaatggcaaggggaacctttacctgggggctgaggccaacaaagaaaaattggcaagctatggggagatagacgacgagtatacatcgatcagggagtacaggaatctttga

SEQ ID NO: 10051 - DNA, 291 bp, synthetic construct
  source 1..291: mol_type = other DNA
atgatcgaggagatcgagatgacctttgacgaggtgctctcctatgtaaagactaaagtggatgtcggcgatgtgctcgaaatcagctacaacaggatcttcgcccccggggaggttctgggattcacagaagaggatgacatgaccggagaaggcttccgggtcggcctgcagctgaacggggaaatccttaaccagagcattgagatcgattttaatgagattgaagacgacctaattgaaatgcgccacatcacggacgaaaaggagctgataatagagattttgtga

SEQ ID NO: 10052 - DNA, 291 bp, synthetic construct
  source 1..291: mol_type = other DNA
atgaaggaactgaaactgaccacaaaagaggcagtcaactacctaaaggagaacgtagacatccacgataggatcgaaattagctataaccggattttcgcggagggcgagatactgaatatggacttcagtgaatacttcgggaaacccggctttaagatgctcatcagcctcgacgagtcccaccttggagccacggtggagatcgatgtgtatgaagttgaggacgatattatagaatttaatcattacccaaaggatggtgaggaggtggacgtgaccgtcatctga

SEQ ID NO: 10053 - DNA, 1683 bp, synthetic construct
  source 1..1683: mol_type = other DNA
atgtcagagtcggagcatcgcatgattgagattctgaggatactgagcgaacaggaaaaacctactgggtccaagctcattgctgacgagctgaagaacaagggattcaatcttggcgagcgggccgtccgctaccacatgcagatattagatgagaaggggtttactgagagaattggaaattctggtcgcaagatcacaaaactggggcttgagaagctcgagaagggcttgatttatgaccaggtggacttcatctacagtaaatttgaagaaatgatctatctgacggacttcaactatatgacccaagaaggaaaagtggtggtcaatacctccaccatctacaatgaggaatcggtggacataattaagaatatcatccagagcgacctctccgttagcccttatgttaacctaaaccgaatcggcaacaatggggagatggaagtaacaacactctgcggcacaaccattgacggcgtgctgcttaatgagggaatcccttcacagcccaaatacggagggctactcaagattgaagacagcgagcctgtcaagtttacggagctcatctcctacaagaaaacatctgtgccccccctggaggccttctccgcaaaaggctgcacatcaatcatggatgtagtggagaacggtgaaggcatcatccctgccaatttccggctcattccgggtatcggccgggaaaaggccataaatatcattaacaaactggataaaataggcatcgggggggtaatcgcgatctctgaagaagaaaaggatatcctggggctctccgtccctgaaggcatggtgggaatcagcatcgtgggtggcatcacccccttttgtgccgtgcaggagcagaaccaggatattgaaatcaagatagccgaggaaattaaagacttcaagaccttgagcccaatcaccagcaagatcaagcccgttctgaaggatatcaagccgactcctcagcagaagatttcatttctgctttccaaaacttggaacttgatccaacaagtcaacttcgacattgagaagcgaaagggggacatcatttccaacgtttcgtttattgataaagacaagatcgacaaaagcctgagcgtgatggaggagacctacaatgataatccaaagtacatcaacccgtactataaattaattaaccaccccacgaatgattcaaaaataggcattgccactatctgcagcctgagcattgatggaattttaatagacaatggcgtcatgagtaaccccaagtacggcgggctgctggagctgaccgagccaccattgttcatcgacctcatcagttacaacggaagcaccgaggacccccataagatctttctggctaagaatatgacaagtattactaggaacaacggaagcaacaaaatcctggcgagtttcaaggagatcccatatatatccagagagcacagcgtccagcttctggagattctgaacaacatcggattcagcatatataaaatcggcaagccaagggaagtgacctacaacgctaaagctgacaattacaactttggtattgtgaccggcagtgggctgaacacgattggtgcaataaaggaaaaaggaatcgatgtcgaagtgaaggcaatcgagaagctattgcccttcgagaaaatggatagactctga

SEQ ID NO: 10054 - DNA, 1359 bp, synthetic construct
  source 1..1359: mol_type = other DNA
atgagcgacatcccagaggaaaaaatcgaaaggataaccgagataatgaaagaggacaatattaagtttatccggctccagtttgtggatatcaacggaactgtgaagaacattgtcatacccttcaatcctgaggatgacatgagtgagctgttcaacgaagggatgttatttgacggtagcagcatcgccggcttcgttggcatcaacgactccgatctggtgttgaagccagatattaacacctatagccgcctgtcatggcgccccgaggagtctgccacatgcagatttatctgcgatgtctggactcctgagaagaaaccctttgccggcgacccaagaggggtgctcaaaaagtcgttgtcccatatcgcaaagatggggctgaagtacaatattggccctgagccagaatttttcatcgtagacatcgatgagaacggctatcctatgccctacgacaatgctggatacttcgacgtggagcctctcgataagggccccgacttccgcagggagctgacactgaacctggaggatttggactttgaggttgaggcctcccaccatgaggtcgctcccggccaaaatgagattgcatttaagtttaaagatgcccttaagacagccgacgcagtaatcaccttcaaacaggctattaaagctattgtcgacaacatggcgacgttcgatcagctggactaccgagtgacattcatgcccaaaccgttcttcggggtgagcggcagtggaatgcactgtcaccaatccgttttcaagggagacaagaacctattctcagaccccgactctgaaaatggcctgtccaaggatgctctgtacttcatgggagggctgctgaagcacgcccccgcagtgactgctatcaccaaccctatagtcaattcgtataaacggctcgtgcccgggtacgaagcgccggtttacagggcctatgggcttcggaacaggtctgctctcattagagtgccggccgcgcgtggcaaggccacccggatcgaatatcgctcccccgaccctgcctgcaacccatacctagcatttacggtgatgcttgaagcgggtatcgatggtattgtcaataagatagacccgggtgagccagtggagctggatatttatagcatgagtgaggaggagagaattgaacgaggaatcaaagtcttgccaaccagtctctgggaagcataccactcactcgaggaagatccactcatccttaacgccctgggctctcatgtgagcgaaaaattcttagagctgaagtacaaagaatgggacgaataccgggtgcaggtatttggatacgaacagaagaagtatctggacatctga

SEQ ID NO: 10055 - DNA, 753 bp, synthetic construct
  source 1..753: mol_type = other DNA
atgccaacaagatatataggcgacggctactgggaaatcgtctcccgccagatgagcattgtgacccggagcgagcagcaaaagttcaaggatactaagattactgtgatcggatgtggcgggatcggcggtcagaccatcgaaatgctggcacggatgggcgtcggagagatcatcctcgtagacgaggattcctttgacatgtcaaacctgaacaggcagaatttcgcaaacctgaatggtattggcatagccaagagcgaagtggccaaagacaaggtgaggcttataaacccatatgtaaaggtgaccggcttcaatgagcacgtcgatgagaccaacattgataagatcattggagatagcgacattgtgatcgatgcccttgacaatgtcctcacacgagtgattagctcccgcaaagctatagagaagaaaatccctttcatacacggggccattcatggaactctggggcaagttacaacattcttgcccaataccaaaagttacgaagagatgttcaacctcccctcgtttgggaaggacctgaccgaggaggtcacggagagtctgaaaaacattaccagcggtacgccgcctgtgatcgggcccaccccaaacctgatcggctgcctgcaggcgatggaagcttacaaaatcatcactggagttggaaaggtgacggttgcccccaaaatcttaacatttgacctcttggacctggggtcatttctcctagaagaaatctga

SEQ ID NO: 10056 - DNA, 1167 bp, synthetic construct
  source 1..1167: mol_type = other DNA
atgctgtataatacactgggcaagactggtctgaaggtctcacgcctgggcttcggcacgatgaggctccccacaatcaactccaacgccgacattgacaagcaggaagcatctgagatgctcagctacggaattgaaaacggcattaacataattgatacagcgtacccttaccacagcgccggaatcgacggtaacggcaactccgaaaaatttctgggtgaatttttgaaagagaacaacctgcgggatgagatcctcctacagaccaagtcgccatcctggttgatcgagaagaaaacggatttcgaatactatttagatatccagcttgaaaagctgcagaccgactacatcgacctgtatctcctccatagcctaaccgtgccggactggaataaggtgcatgatctggaggtgctcgactttttagatgactgcctgtcgagtgggaagatcaaacacgttggattctcatcccatattgagatagactatcttattgagatcctggatgaataccccaaatgggaagttgcattgacccagatgaattaccttgacgagtattaccaatcaggggtcatgggccttaattatcttaaggagatcaatatggggagtatggtgatggaacctctgcgtggcggaaggctcgtccaaaacatccccaacgaggtgcaggagctgtggtctacagcggagaagaagcgcactcctgtggaatgggcactccagtacctatggaatcggaacgacgtggactgtgtattcagcgggatgaacagcctgaatcaagtgaaggagaatgtccgaatcgcctctattgaggacaaaataagcgaaaatgaccaggagttgatcagggaggtcgccagaacataccgcactttcctgggcaacagttgcacccggtgtggatactgcatgccctgtccgcacggggtggatattataaactgcctcacggaatataatatcgcccacatgatgcagaaccccaaagcttccgctatgcagtatttcaccctgatagatgatgattccagagccgacagttgtatcaactgcggagagtgcatcccattctgcacccagatgctgaacattccagaggagctgcagaaagtatacgaatactttgggagcgagtttaatcacttctga

SEQ ID NO: 10057 - DNA, 1251 bp, synthetic construct
  source 1..1251: mol_type = other DNA
atgagcaaggtgaaagatataagcctggcgcccgaggggatcaggaaaatcgagtgggtgcagaagcatatgcctgttttagagcacatcaagcaggagtatctggagacccagcccttcaaaggcattactatcggctcgtgtctgcacctcgagcctaaaacgatcaatctgggtctgaccctgatggcagggggggccgaggtcgcaatgacgggatgcaaccctctgtccacgcatgatgacgctgtggccggcgctgctgatctcggcctcaatgtgtacggctggagggaacaggacgatgaggaatattaccaaactataaatatggtcctggaccataaacccgatataattatcgacgacggtgccgacatgatcatggtgctgcacaatgaacgaaccgaactcttaagtcgtattaaaggagcttgcgaagagaccactaccggtgtgcacagactccaagcaatgcacgcggatggggcattgaagttccccgtgatcgctgtcaacgacgcttacaccaagtacctgttcgacaaccggtatggaacgggtcagtccagctttgacgcgataatgggaacaaccaacatggtaatcgccggcaagacagtaacaatctgtggctatggatggtgcggaagaggcctggcactgagagccgatggtcttggggccgacgttattgtcaccgaggtagacccaatccgcgccctagaagcacgcatggatgggtaccgcgtgatgaccatcagggaggctgtgaagcagtcagacctgatcatcacagtcacaggcaattccgatattataagtggggacgatttcaaatacatgaaggacgggtgcatgcttgccaactccggccactttaacgttgaaatcaaccgaccagatttggaggccatttcaactgaggtcaaagaagtgcgggaaagcattgaagagttcaccactaaggacggacgcaagatctatcttctcgcggatggccggctggtcaacctaagcgctgcccggggacagggacatccggccgagattatggacatgagctttgctgttcaagcactgtccgccaaacacattcttgaaaatgacctctctgtgggcgtgactaaggccccagatgagatcgactacagtgtggccacaatgaagttgaaggccatggggattaagattgacagcttgaccgacaagcagaaagattacatgtcaaactggcaggagggcacatga

SEQ ID NO: 10058 - DNA, 651 bp, synthetic construct
  source 1..651: mol_type = other DNA
atgtccttctttaaatatatagataacggcgaaggtcccaccaagctattcatcgggggactgcacggcaatgaagggaccacaagcctgaagttcattaaacggatcaaagacgaaaacctttcctccggacagttctacttctataattttgataagactccatacatcagcactgtggacaaggagtactacaaatctgagctggggcaaaaagtgctcggtcttatcgaatacctttgtcccgacttttacacagagctccattgctataatctgaagaactatgataagctaactagcatggagcgatacaagaagacaggcattcccccactgatcaagctgggaaaccacgttctcgtctcaagcgtaagccccttaatccggatgacgtacttttccaccgagaccgtctgcaaaacgctggagtttccgtgcttcgaaaagctgaactcggagatcattgaaaagtacaatttcaacaagagtctggcaatcgagacctatgaggagctgctcaatttgattctcagttcaccttctcgcgaccactttgaaagagagatgttgaaaaaacacgaaaaccaggtgcatatagcgatgaggtatgccgagaaggtgttcggcaaagacttccctccatactga

SEQ ID NO: 10059 - DNA, 336 bp, synthetic construct
  source 1..336: mol_type = other DNA
atgaacttcctgaacaattgtatcatcgtattccacgtgacgcatcggttcgtcaaggatgtccagattaaaggcatactagacatggactattacggtgagatcgagaacccattgcagtacttcgacgaggacaagaacctgatctggcacattcccccaaatccttacaggggaggcacaaaggagtatgtggcctacaaaaagctcatcgaggagtttaaaccggacgatgggtttattgaacttctggcggtgtgcggggaataccccgaatattatcactacgattggtacgatatagagatggaagcactcacctgggaaagcatctga

SEQ ID NO: 10060 - DNA, 984 bp, synthetic construct
  source 1..984: mol_type = other DNA
atgggggtgaaactcaaagacataatcgagccagagtcaattagtttcaaagacctggaaggaaggactgtaagcattgacgccttcaatacccttttccagttcttatccaccatccgccagcgagacggccgccccctcacggatgagaacggcaacatcacctcccatctgagcggaatcctgtacaggaactccagcatggtcgaaaaggatatcaaaccgatttacatctttgatggaaaagcacccgaactaaagagtgagactcaggccaagagacgggaggtgagggaggaagcggagaaaatctacaaggacgcactgtcacgcggcgacgctgaaaaagcgcgtaaatttgcaatgagaagctcgaagctctcacccgagatcatttcctcttctaagaagctgttgacactcatgggaatcccttatgttgacgccaagggcgagggtgaggctcaagccgcctacctcgtacaaaatggggatgcctacgccgtggccagtcaggactatgattgtctcttgttcggagctaagcgagtggttagaaatctggctgtcaacagcaaccttgggaacctcgagttctatcagttggacaaagtcctaagggaactggacataacacgggaagaactgattgacatgggcatactgatcggtacagatttttgcgatggtttgaaaggcgtgggggctaagaccgccctgaagctggctcacaaggggcaactgaaggagaagatagcagaacttcagaaggaaagcgcgcacgacttagatgaggtgcgggagatcttcctcaaccacaatgtcaacacggattacaagatcaagtgggagaagccacagaaagataagattattgagttcctgtgctatgaacatggcttttccgaggaccgggtgctgaaggcatcggacaaactgaaaaacctgaatagctcccagggcagtcttgacgcctggttttga

SEQ ID NO: 10061 - DNA, 564 bp, synthetic construct
  source 1..564: mol_type = other DNA
atgagcgagccgaaaaatgaagccaacagaggcctgattgataagataacacaagtggagcaggagtatggtaaaaatttcagtaacacgcagaagattctgctgaccactgacggatcaatcacagccatactcgatgtactatacgggaagatcacattgtcgacccttgatcagcatttcgaggacgcggacgaatatcacgctaaactggtcaacgttaataaaggggatgaaatcaattaccgagaagtgatcatgcatcggaacggcaagcccttaatctacgcaattagccacatcccactctcccgctgcacgaaggaggtgtgtgctgatctcatcagagcagacattcccattggaaggatcttgaaaaactacaacatcgagtcccggagggagatcaataacatatacattgaaaagcctaacgagactctgaaggagctgtttggcaccgacgaggacatgctggcccgcgactacgtcatcatcaaccacgacaagattcttatgtggattaaggaagtgttcccaatcagctattttaccgaaatatga

SEQ ID NO: 10062 - DNA, 1254 bp, synthetic construct
  source 1..1254: mol_type = other DNA
atgaatatcaccgagaaaatcttgtccgcaaaagccggccatgaggtcacatctggcgagatcattgagattcccgttgatcttgcgatgtcgcatgacggaaccagtccccccgctattaaaacatttgagaaggtcgcgaagaatgtatgggaccctgaaaaaatcgccattatattcgaccacaacatccccgccaacacaataggttccgcagagttccagaaagtctgtcgggacttcatcaaaacacaaaacattactaagaacttcatccacggtgaaggaatatgccaccaggtggtgcctgagatgggcctcgtggagcctgggatggtgattgtgggggctgactcacacacctgcacgtatggggcctttggcgccttcagcaccggaatgggggcgacggacctcgcaatggtgtgggcaactgggaagacctggttcatggtacctgaggccattcgaatgaaggtggagggtgagctgaacccatacatcgccccaaaggatatcatcctgaacattatcggcgaaaccggcatcgccggagcaacatacaggacggctgaattttgcggtgagactatcgaaaagatgggagtggagggacgtgctaccatgtgtaatatggctatcgagatgggggctaaaaatggtatcatggaaccaaatcgggaggttattaactatatctgccagcgcacgggcaagaacgaatcggaattaaacatcataaagagcgatgaagacgccgtttacagtaaagagatgcacttcgacattgaaggcatggaaccgcaaattgcatgtcctaatgacgtggacaatgtgaagggcatctccaagattgagggaactgtcataaatcagtgcctgatcggtagctgcaccaacgggagactgtctgatctaaaggatgcggccgagatattggaggggaagaaaatcaacgatgacatcaggctcattatcctgccagcttcaagagaaatctacaagcaggcaatgcatctgggctacatcgatacatttatagacgccggcgctattatctgcaatccaggctgtggaccctgtcttggcggacacatgggagtcctgtccgagggcgaaagctgcattagcaccaccaaccggaactttaaagggcgcatgggcgatccgaagtcttcagtctatctctccaatagtaaggtagtggccgccagcgccatcaagggggtgattactaaccccaaagatctgtga

SEQ ID NO: 10063 - DNA, 1179 bp, synthetic construct
  source 1..1179: mol_type = other DNA
gtgatcatcttgcagtattttatcagtcattacaacaaggagtatgagctgaactttccggaggacctcctcatctacgatacaactctgagggatggcgagcaaacccctggagtgtgtttcagtttcgatgagaagcttgaaatagctcgaaaactcgaccagttcaagattcatcagattgaagctggtttcccaatagtctctgaaaaagaaaaggagaccgtcaaggcaattgccaatgaaggtcttgatgctaccattttaggcttgacgaggaccaaaacagaggacattgacgccgctctcgattgtgacgtgggggggatcattacgttcgtgggcacttctgacattcacctggaccacaagatgcacataacacgccaggacgcaattaacctatgcgagacggcaattgattatgcgaaggatcatggcctgtacgtggccttttccgccgaggacgctacaaggaccgatatcgagtttctgaaacggatctatagcaaggccgaagaatgcggggctgaccgcgtccacattgcagacaccactggggccataacaccccagggcatcgactacctggtacgggaactggtcaaggatctggacataaacattgccctgcactgccacaatgacttcggtctggcggtgatcaactcaatcaccgggatcttggcaggcgcaaaggggatttccacaaccgtcaacgggattggcgagcgggccggaaatgcctcacttgaggagctgatcatggccctgaagatcctctacggtaaagactacggcttcaaaaccaaatacatcaaagaattgtccaacatcgtaagcgaagccagcggccttccaattccctacaacaaacctgttgtgggaaataatatatttagacacgaaagcggaatccatgtggacgccgttatcgaggagcccctatgctacgaaccatatgttcccgagctggttggacagaagcgccagctggtgttaggcaagcacagtggatgcagagctgtgaaagcgaagctcactgagtgtgagctggatgtgtcggatgacgaactcatccaaatcgtccgagaggtgaagaagtccagagaggagggaaaatatatcaacgataaggtattcaaggaaatcgtgaagaaaatcagcaaaaaggagtga

SEQ ID NO: 10064 - DNA, 552 bp, synthetic construct
  source 1..552: mol_type = other DNA
atgatcgaggtcgaagtgaaagccaagatcaccagcttcagtgaaatggaaaaaaaactggagaacatcggggcaacaaagagcaaaaaagagtttcaggaggacatctacttcaatagccccatcgtgaactttgctgagtcggatgaggcactgcggattcgaaccacaaaggagaatgacaacgtagatatattcattacgtacaagggcccgaagattgataagaaaagtaagaccagaaaagagattgagatgaagatagaagacgcggagaagtgctcagacatcttcgaagccatcggctttaggaaggtgcggactgtccgcaagaaccgccaatactatacctacgaaaacttcgaaatctccctagacgatattgaggggctggacccatatatggaaatagagatcggacttaaggacggagaagactattctaaggcccagaaatccatcttcgatctgtttgagaaactcaacatcacagagggcttcgataggacttcctacttggagctcctcgaaaacctgaatattacgaattga

SEQ ID NO: 10065 - DNA, 546 bp, synthetic construct
  source 1..546: mol_type = other DNA
ttgaccgatgtggagataaagattgagaacatcgttgctagcgccagcatcgggaaggacatcgtgctcacagaggtgtcccaagcccttgaaggggtgaatttcaatcgggagcagttcccaggactggtctttaagctcaaagatccaaagacagcagcactgatatttagctcaggcaagctggtctgcactggagccaagtcgatcgatgactccaaacttgcaatcaaaaagactgtagacctcatgaggaccattgacacggagatcccccacgagttcgagattaaaattcagaacatcgtggcctctgctaacttggaatccacacttaacctcgaggccgtcgcgctggaactggaaaataccgaatatgaacccgagcagttccctggtctggtatacagactgagcgacccgaaagtggttctattactctttggctcagggaaggtggtgtgtaccggcgctaagacgaagagtgacgccaaactgggcgtcgaacgcgcgtacgatcgactgagtgagctagacctgatctga

SEQ ID NO: 10066 - DNA, 1542 bp, synthetic construct
  source 1..1542: mol_type = other DNA
ttgatcaagctagttgtctttgacctggataacgtgattatcgacggcgaggcaatagacgagatcggaaaaatcgcaaatgtggaggaagacatagcggccattactgagaaggccatgcaaggggaaatcgacttcgaaacatctatcaaggacagggtgcagctgcttgagggcatcagcatcgaggatatcgagaaagttgccgacgagctccccctgataccaggtgccctggagacaatcaagtctttaaaggacaataacttagacgtggctattatcagcggtagtttcgatgtcgtggccgaaaagataaaagataaactcggggtcgacaaagtgtatactaacagtttcacagtcgaggatgggaagctgactggggaagtgacagggccattggtatccggctcaaagctggacgttctgaacgggctggtggaggaagcaggaattacgctcgatgaagtagtggctgttggagatggcgccaatgacatttccatgatcgagtcagccgggtgcggaatcgcattcaatgcaaaagattcagtcaaggagattgcggatgtggtgatagacgagaaagacctctgtaaggtctcagagaaaatcctgaatcagttgaccaccgacaacgccggcaacgaaactgtcgaaaaaaaggctgaagagaagaacacgctgccgaagagcgattttgtccttgccgacaccatggagggcgtaaggaaacagaaggacgagaaagaggctgagatcgccaaagtggccgaggaaagagagaacttcaaccgcatggctaaggaacagcgaaagattcgagatgaattgaacgcaagcctcaaagagaacctaaacaaagcgattgagtttcgcaatgaacggaacgaaatcaataaggctgtggagtccgccaagaaagcccgtaacgaggccaacaacaagattaagagtctggagtggtcgtctggtaagcgcgataagattaagatagagaatgaaatcaagaagatcgacaagatcattgaaacccgggtgctagacattaagaaggaaaatcagctggtgaagaatgccaatgatctcagaaaacagctgatgaagattcatgaggacgaatcggtgcaaggcgagagccaggagctcaaaaagctgagcgaagaggaacacgagaaagttatcacactttccgagaaagcccaagcggctcacgaggagatgctgacctacttcaggaaaaccgacgatatacgaacggctgccgacgaagcacacaagaatttcatcgaagcacggaagaatgcgtccgctaagcacgaagaatttaagaatatcctgagtgatattcacgtgatcaacaagaaactgggttcccatcgccctaagaaacggagaaacgataacaaaccctctagcggaagcaataggaaccgggaagagaaggagagagctgaagagatctttgccaaattcaaaaacggcggaaaggtctccaccgaggagattctcctccttcagaagtacaacatcggctga

SEQ ID NO: 10067 - DNA, 147 bp, synthetic construct
  source 1..147: mol_type = other DNA
atgacagaagagaagattgaaacctgcttcatctgtggcaaaaaatttgatatgaacaaggccgagctcgggtactatcggaatggaaagtaccccatctgcgacttctgcgcagacttttaccgcttctataacgaggagctgtga

SEQ ID NO: 10068 - DNA, 2157 bp, synthetic construct
  source 1..2157: mol_type = other DNA
atgcatgaagtgattgtgtgtgaaaagccaacatctgcagagaagatagccaaggccctgtcaccaagcgcaaaaaagaaggtgtataacaagaaagtcaagtattgggagctcaagaaggggtccaaggacattacggtggtatctgctgtcggacacctgtatagtcttacccctgacaacccaaaagataaagtatacttcgatctgcactgggctccggcctatgaagttaataagaggggcagcggctttaccaaggactatgtgagggctattaaaaagcttggacgcaatgcggactcctatatccatgcctgcgattacgacaccgaaggaacactgatcgggtacaacgccctgaagtacgcttgcggtcaagagaacctcgataaggtgtcgcgtatgaaattctccacactcaccaagaaagacctcctcgaagcgtacgacaatagaatagaattggacatgaaccaggtcgataccgggattgcaaggcatgtactagactactacttcggcgtgaacatctccaaggccctgatgaaaagtgtcagcaacgccaagcaccgcttcttaaagttatccgccggccgggtgcagacacccactctgagcatcttggtcgagagggaaaaagagattaaggattttgtgcccgagccctactggttgatcaaggctgtggtggaaggaaacatcgaggtcaatcatattgacgggaagatttttgacagggaccgagccgaggaaatcatgaccaaatgccagggaaaggatgccattgtggacagaatcagcttttccaattccacaacaaaacctccggtaccctttaacctgggcggcctgcagtctgaggcttataatgtcttcggattctcccctaagaaaacacaaactattgctcagaacctttacacctcaggttatacgtcgtaccctcggacctccagtcagaaattgcctgaaagtctggattttaaatcaatatttacccagctggggtacgatggtgaatttaagaagcacatcgatcagctgccatccaaactgaaacccaacaatgggaaaaaggacgacgccgcccatcccgcaatccacccaaccggcatcctcccccaaggcctatctaaggatgataaaaagatttatgagcttatcgtgtatcgctttatctcagtgttcttcgaggcagctaagttcgaaacaatgagcgccacactcgacattgagggtgagaagtttcgattcaagcgccgacgagttacgcacaagggatggatggaacactacccattcagaaaaattgacgatgagatattccctgatatcaaggaggacgacctgatgaaggtcctggagctgatttctgacgagaaagagactaagcctcccgcccgctataaccaggcgagcctgatcaaggagcttgaaaagagagaattgggtactaaggcaactcgtgccgatatcatcgataaactgtacgaccggaagtacataacaggcactcagcagattgaagtgaatcaactcggcgagaacatgatcgatacgctcagtatttattgtaacaacctcaccagcgaggaactgacccgggacctgcagatcaaactggacgggattagcaataacaaaagtactcggagggagatcatagatgagggggaaaaggacgttaaagtgatattagaggacatcactaaaaactcaaatgagatcgggagcaagctctacgagtcatatcaggagagtaacatcatcggaacctgccccacgtgtggaggcaatctcgtcaagagatacagcccaaagactaagagcagtttcgtgggttgcgcgaattacccggattgcactacgagctactctatccccaaaggcaccaacttcctgaagaagacctgcgagaaatgtggcctgcctataatcagcttcgggaagccccgccagcgggcatgtctggactctaactgcggcaaggacaaaaccaaaattcacaaacctaccgaggttggtaagtgtccgaattgcggcaagccccttttgaaacggtcgggcagatacggggaatttatcggatgcaaaggatttccaaaatgcaagttcacatgttccgttgacgagctagaaagcaaactaaagtga

SEQ ID NO: 10069 - DNA, 2679 bp, synthetic construct
  source 1..2679: mol_type = other DNA
atgaacaaagaaacaaagatgacaatcgtcaaaagcgtgtttattatcctcattctgctcgcagtggtttttgccctgaaaatgcccgctgccgatttgccgctaattactgacgaagctaagggcgagtacgttgattcgagcggcctcccctatttcagtgaaatggattcctattataacctgaggctgaccgaagactacattgatcatgggtatgtgggggaccagataataaatggtagcgagtgggatatgcacaggtatgcccctactggcaatcagatcaattacgagctagggatcgtgtatgtcacttcgttcctgcatgacatctttggaggcgaccactcagttagagaaatagccttctggacaggcgctattatatcaacccttgccgtgattccagcgtacattttctcaaggcgcttaactaacgagtatggtgcaattgtcgccacccttatcatcgcccttgccccaaactactttgcacacaccttcccgggattcttcgacacagacatgttctattacatcttctcattgttcttcatattcttctttgtagagagtatccgagcgaaaaaaatcgcctacaagttgctatttgcaatcctgtccattatatctatcggcctgttcagccaaagctggaccggttatatcttttacataggccttatgggaatatttagcatcgtgtatctgatcgcttgctactactttaatattggggaggacagccaggacgagtactcaagtaagctacattggtttattaaccaaaatgccctgaaatccatcttgatcctaggaatcattggattcattggtcttgccatcttcaaagggttagatggggtcacgggactcttcggaagcctgctgagcctgctgtccctgcagtccgcctcccgcgtggttggcggcttccctaatgtacttgtgtccgtggcagagatgcagatcccatccatgctgggcagcggtatgaatagtttatttctggctaacaccaatggggctgtcaacgggattggtggcataggggttctctttgccggcttgacagttgcctacctgttcgtgcgaaacatcttccgcatcaagggaaactctgttaagaccgaatccaacgtgaagccccagaagagcgaaaggctgtcctccagcaagcgcctcgataacaaacggaagctgaagattgatctgagccggtataatctcgaatttgtgagcgatatcctgtccgacaaaaaactcacactgttatacgggactctcttcattgtctggctcgtggtaactgcgcttgctgtcacacggggttcacggtttatcacgaccatcgtcctgccatttgcccttcttaccggcatatttgtcagtatcgcgatggaatatatcagaaacaaaataaccgatgatcgcattctgttggctatcaccgccatcgcagctatctttgtggcagtgcccgtgtcgaccgtcaattccattttcgcgattctggtgtttgtggccatcgtgggcattggggccgtcagcatctatgtgctcaagcctaaagctacatctggaaggaagctcccaatcaaaaagcacattgcaatcatcgccattgtactcgcgctggtcacgccctgtatctgcggggctttcctgacgagcgagtcggtggttcccggcacaagcgactcaatgtggaatgcaatgacttgggtgaatgaaacccagagtgatgatactgtgttgacctcctggtgggactttgggtacctcttcgagattgccgcagacaaacaagttacattcgacggaggcagccagagcggagaccgggccttctggctcggccaggccatgaccacggacaacctggagttgagcgcaggcatattcagaatgctggatacaacaggtgataaggccgttgagtctctggtgaacatcaccgaggacaccggcaagtccgtggatatcctcatcgacattttacccatgaagagcgacgacgcccagaagaccctgcaaagtaagtatcacctgaccgcggctcaagcaaatgaggtcgtccagtattcccacccgaagaacccacgtcctgtaatatttgtcgcctcttccgatatgctgcagaaagctggctggtggagttacttcggtgcttggaactttacaaaccagagctcggagaactacaactactacgtgcctacagagcaggtgaaggtgaacccgggctcaactggcaaactggccttgcttgacgaccagggtatgactgtaaatgccgtaatccagagaggctctggcaacaactcaaccactgcatatacggaggccgtgtacaccgacagtggaaagcagattatggtgaatgacactccttacaaccccctgaatattagtaacctgatggttatcgaagacggatacgtcatgaagaatcagtctgtgggaaacgtgaaggatgcaaactacaccctcctcctcatcggggaaaagaaccaatacacccccatcctgatgagtaatgagctagcgaacagcatgttcacacgactgtacttgtacgggggagccgggcagaacattttcgagaatgtccatacggagaatggagtgatgctgttcaaggtgaactttaataacacggctgctggggcttga

SEQ ID NO: 10070 - DNA, 1095 bp, synthetic construct
  source 1..1095: mol_type = other DNA
atggggatagaggagaaaataaaggacatcgaagacgaaatacaaaagacaccatataacaaggctacttcacaccatataggcaagctgaaagccaaactctctaagctcaaggaggagagtctgcagagaagtagcggtggccataagggtcagggcttccacgttaagaaaaccggggatgcgactgtggtactagttggatttcccagcgttggcaagtctactctcttaaacgaaatcaccaacgccgagagtaaggtgggagcttaccagttcacaacactggatatcgtgcctggggtgatggagcacaagaacgcaaagatccaggtgtttgatatccccggaattatcacaggagccagcagcggtaaagggaggggaaaagagatcctgtccgttgcacggacggcagatctgatcttaatcgtcctcgacacactcaacccacagcacttggatgtgattctgaacgaactgagaaacatcgggatcagacctaatgaaaaggaacctgacgtcacggtcaaaaggaagaaactggggggcatccacatttcgtccacctgtccgctcactcacctagacgaaaagattatccgatccatcatcaatgagtatggcatgcataatgccgacatattgttccgtgatgacgtgacgatggatcagtttattgacgtccttgatcgaaacaaatcatacgtgccgatgaaaatcctgctgaataaggtggatcttgtcgatgactcctaccttgaggaactcaagaaatacattcccgacttcatcccaatttctgcggataagaaaaccaacattgacgagctgaaggacattatctttgacaatctgaatctggtgagggtgtatttgaagccccaggggcgcaaggccgacatgaacgaccccctggtcataaaaaagggcaccaccgtaatcggcgcttgccgcaagttgcaccgcgagttcgtgaaaaatttccggcatgccaaggtctggggaaccagcgtgaaattcccaggccaaaaggtaggtcctgaccacgtccttgacgacgaggatgtgctgcggattattctcaagaaatga

SEQ ID NO: 10071 - DNA, 546 bp, synthetic construct
  source 1..546: mol_type = other DNA
atgtccgaagctatttttataacgggcaccccgtgcactggcaagacaaccgtcagtgaggtcctgagctcgaaattgaactgcaagctcatcaagattaatgatctggccatcgaaaacgacttcgtgctggggatcgacgaggagaagggctaccgcatcattgatattgaggcacttgatgagaaggtgtcagagatcattagcgaaagtgacgagctgatcatatttgaggggcacctggcacatttatgctcaggagccgacaaggtcatagtgttgagagtgaatcctgatatcctccgacccaggcttgaggcgcgggattattccgaaagcaagatccgggaaaacctggaagccgaggccatgggagtatgtaccagcgaggctttcgaagaatacggggacaaaatctctgagatcgacgtgagcaaactatccatcgaggagacagttaatgtcattagctacgtgatcgaagacaaactcgatttcccagtgggtgaggttgacttcatggactggctgatttccaacttttga

SEQ ID NO: 10072 - DNA, 825 bp, synthetic construct
  source 1..825: mol_type = other DNA
atgggggagaccaatgtgaaaatcctgtatctgaccgatctctactatgaagccaagggccggaagtacttcgaagaggacttatatatcagcggaatactcaaggaacatttcgacattgccttgtgccacccgaagaactcaaaggactttgaaaacgatgtggatctcatcgtttttagaaatacggggcctgtaactggattcgaggaggagtacgagagtttcgtcaaaagggtcacgtcgaacgacatcaggactttcaatgagttcgtgggcaaggcggacatgaagggcaaacagtaccttttggatctgacactggatgggtaccctgttattccaaccatcgatgacctggaaaacataaatctgatcccagattgtgaagagtacgtcattaaacccaaggatggtgccgattccataggtctggagtttctaaccaagagtgagttatttgaaaagaacctcgtgaacatgctaatccaacccgcaatcgactttgagtacgaggtgtccttctacttcatcaatgacagcctggagtatgccctgtatgctccaaataaggacaagcgatgggaacttgaaaaatatgaatttagccagcgcgacaaggagtttgcagaaaaattcattgcttggaacgacatcgaaaacggaatccagcgggtggacgcctgccgcacaaaagagggcgagctcctccttgtggagctggaggacctgaatccctacctgtctattttggagctggacgagaaaacaaaggacgatttcatgaaccacctcattattgcgctgaaaaacatctgcgattga

SEQ ID NO: 10073 - DNA, 387 bp, synthetic construct
  source 1..387: mol_type = other DNA
atgaataatgacaagaaagcggaaaaatgcccaatggaactggccatggaactcatcagcagaaagtgggtcatccagatcctgcgcgatatgttctttggtaaaaagcggttcaacgagtttaaggatggaaaacccaatctaagcaacaaggtgctttccaattgtctcaaggagatggaggagaacggccttatcagtaggaacaacgatgaggacaagcagattattgaatacacactgacggataaggggaaaaagctgaacaaggtggtatacgagctcgcaatgttcacattaactaccgacctgggcaacgaattttatgacgacgagaccaaaatcgagctggagaacattttcaaaaataccttgataaacaattga

SEQ ID NO: 10074 - DNA, 447 bp, synthetic construct
  source 1..447: mol_type = other DNA
atgaaattcaatgcatggaataataacgagaaattcttctcatccaagatcgcccaaaacgtaatttctaccgcttgcggaagcgacatcaacactgcctgcggaagcgacgtcgccgcctcggcctgcggctcagacattaacaccgcgtgtggcagtgacgtggctgccagcgcatgtgggtctgacattaacacggcttgcggcagtgatgtggcggctagcgcatgtgggagcgatatcaacactgccgtggccgtgatgtggctgctcctgctcgtggttctgatcctgaccctgcttgtcgcagtgatgtggctgcttctgctcgtcgttctgatcttgacactgcacgtggatcagatatccccccagttggtcgtacagacagattttaagattaattccatcctcaacatcttatttttctacatactatttttctga

SEQ ID NO: 10075 - DNA, 1029 bp, synthetic construct
  source 1..1029: mol_type = other DNA
atggctgatttttttgcctttcagtggcatatcctggatgactgtgaccagcgatgcaagcactgctatatcttctcagaagaaaatgacaaggaactcataacgatgaaatatgaggatatggagattgtgttagacaactgcctgaaattctgcctgaaaaccaacaggaccccatacttcagcattactggcggcgacccgatcctccaccctgacttttggcaattgctcgagatgctgcacgaaaagaagatccactattccatactgggcaacccctttcatatcaccgatgaagttgctaaaagacttaaaagcctgagctgcaggcagtaccagctgtccttggacgggctacgggacacccatgactattttagaaaacccggctcgttcgacattacccttgagaagattcgcatccttcaggatgccggagtccgggccagcatcatgacgacagtttccaagacaaacatcgatgaaatcccagatctgatcgacgtcgtggtggagaataatgcctgtctgttctccttcgcacgttattgtcccacctccctcgagaaggcggcacagatgacttctgaagagtacaaaaaccttttggcaaaggtctgggagaaatacaacgagtacaaggacagcaaaacgttttttacactcaaggatcatctatggaccctgttcctgtatgagaaggggctgtacgagatcccagagaatctgaacgacgatattgtctacgacggatgcaactgtggaaacagtcacctcacaattttgccttcaggtgatgtattcgcctgtcgccgcatggacagtaaggtgggtaatgccctcaatgagtcaatatatgatattttcatgggcgataacatggacgaataccggcagttcgaaaagttcgagaagtgcagccgatgcgagctgctgaggttctgtagagggtgtccggcggtgagttacgggacaactcacgacatgtactctcctgacccccaatgctggaaggtggtgttatga

SEQ ID NO: 10076 - DNA, 966 bp, synthetic construct
  source 1..966: mol_type = other DNA
atgaaagcagtggtgttggaaaagacctgcaacgcggacgagctgaaggtcagcgaagtggagatcccaaaagtgaaagatggttgggtgttagttaagatcctcggcttcggcatcaaccgcgctgaggtaatactgagggattatgaggccgatgaagactacatcgaattgcctgtcattcccgggatcgagtgcgttggaaaggtggtggactcctcaaatacccgatttaaaaacggggataggatagctgccctgatggggggaatgggacggagttttgatggcggatatgccgaatatgctctcctacccgaaaaaattgtcttcaaaattgatgaggacgtcttcgacaagctgacactggaggagataatagccattcccgaaacgtacttcactgcctatgggtcgctgatgagccttaatcttgtaaaggacgacactctactgatccgtggggcaaccagcgctttaggcctttccgcaatgcagctggccaacagcatgggatgtgagatcttcgcaacgtccagatccgaggaacgctttggtaagctgaagtcaaatggtgcggatgagtgctttgccgacgatgggtgtctggccgagaaactgaattgtgacaaggtcctggaactcatcggccccaaaaccctcgaggacagcatgaagtgcatcaacagtggcggcatatgctgtgtgacaggtgttttgggagggattgagtacatggacgaatttgacccaatcaagattatcccaaatggccggtacctcactagtttcttcagcaactacccgacacaggagatcatggacaacatctttgatttcattatcaagaacaacatcaagcctgagattagcagagtgttctacaatctggaagacattggcaaagctcacaccctcatggagagcaacatggcccaaggcaagattatcttcaagctcgagtga

SEQ ID NO: 10077 - DNA, 612 bp, synthetic construct
  source 1..612: mol_type = other DNA
atggtgacaaaggaggaatgctttaaacagctccgagacgtgattgatgccgttctgtccaccgtggacgacaatggcaatccccaatcgcgcatcatcgatataatgcacatcgaagacgataagatctattttctcaccggccggggcaaacacgtctactcagagattataaaccacccaaaggtaagctacctcagcctgaaggacaacaagtccattagaatcagtggcgaggcccacaaactggacaaccagaaatactggatcgatctaatattcgaaaacaatccattcatgaacaacgtctatcccggaaacgccaggtatatcctggagcctttctgcattgaagattacgaaatggaatttttcgacctgacccagaagcctatcttccggcaaagcttcaaattcggggacgtggagatcacagttaaggggtttgagattacgggggattgcattgcttgcggtacttgtcaggcatgctgtccacagcagatccccgtgtttgtggacgataagttcgagattcccccggagcattgcttgcattgcggactttgttacgagaattgtcctaatgacgcgatcgtcaagagggagtga

SEQ ID NO: 10078 - DNA, 627 bp, synthetic construct
  source 1..627: mol_type = other DNA
atgctgaaaagcgagaatggaatcattaaccagattgggtctaggatactgaccaggaaagccatactgaacaactccattaattacatcgagaagtgcgtgagctccaataacattttcaaaagacgcggtgtgatcgaggccatttcagtcgagttcgatgcgataaacgactattcctttctgaagcaaattatctcatgtttcctgaacgaaaccgacgtcgagatcctgagtaacctctctaaggtaatggacaagatcacgcggaacaactgctcctacttcaaggatgaaattctcaaatacatctctaaggacctggataaccactactatttgcatttgatcaatagtttctatgaaattagcgggggcgaagaagacgaatttatcctgaaagctatcaagcccttcatcgactacttcgaaaagaatagcatcgacatccgaaaaatcgacgcaagcatttcgacacggatcagtgatataatcctcaagatctacgaggagaacctaggcgacaacagcattaagaatcagtgcttagattatattgatatcatagtgaaggatgacctgtactattttgagaataaacttaatgagaagtttgagctcctttga

SEQ ID NO: 10079 - DNA, 582 bp, synthetic construct
  source 1..582: mol_type = other DNA
ctggaccataaaatcacggacctccagatcaacgcactaatcgggaccaactcaaagtacgagattttcgagatcgaccggcaatatgatatcatgagcacatccatcaagatggacaaatctaagaaaatcaatttcaacaatcacatgccccacgaatgcacccttctgaagaacgtgattgagctcaataacaaggaactctacgataaaataaaggactacttttgcctgtactatattagcgctttggagaacacaattgaaaacagttttagaaaattttggagccttagcgagaggattataaaggatattcacggcggcatgaaggacgagaaactggtgaagtacatgggaaagctgctgaagatgtgccgctatccagataagataatccagcgagtcaaattcatcaaaatcaaacggaacaatctggtgcatgaaaatattcacggtgagataactcagtccgatcaggccattgtcaagatcatcgccgagaacttaatcttgttcctcatctgttactttaatgaagtaaccgacattggggactacaagtcgttctatgatctgtga

SEQ ID NO: 10080 - DNA, 645 bp, synthetic construct
  source 1..645: mol_type = other DNA
atgaataagatcgaatacaccacgaggaaattgaactcactcaagcagaccctcatcaaaagctttgaggctatcaacagcactagcaacgacccaaagtactactacgaaacaatctgggacctgatgaaccagaagagcaacattaaggagatgtttgtgaaggccacacttagcaagcagatttatctcataaatatttcttccatcctgagaaagatccagaacaacgatgagtcggacattctggataattttctagtcgagcttaacaaaatgtacctggagtacaacgctatggacaaagaacaaatcaacattataatttacactaatattcccatcaaactgaagagtaatgataacctcatcgagaccctcaaatatttcaacttaaagattttcgagttctcaagttacaacttcgagaatgaacttgacttggacgacgaaatcaaatacaagttcaatagttccaagttcttgatgctgaagtacgcggcagatgcccgcgattatgaatttgtgaagtctgaggccctgaatgcaatttattccttctttgggtatataacctatatccatcggctgatcatgatcctgaaatccggcatactaatgaaactgcactggatcatcaagtga

SEQ ID NO: 10081 - DNA, 423 bp, synthetic construct
  source 1..423: mol_type = other DNA
atggtagacacatttagcaaagagactcgctcctatgtgatgagccgaataaaatgcaaggataccaaaccggaaatcatagtgcggagttatttgttctcaagaggcctgcgcttcaggaagaacgatgagagatatcctgggtcgcccgacattgtcctgccaaagtacaagaccattgtgttcgtgcacggctgcttttggcatctccacgagggttgcaagtacgcacgtatccccaagagcaacgtcgactactgggagaagaaactgtacaggaaccgggaacgggacaagcacaatcagaaagaactcgagaagatgggatggaatgtcatcacggtgtgggaatgtgagctgaaaaaagacaaggttgaacagacacttgaggatctatacgcccaaatcacctccaagctgtga

SEQ ID NO: 10082 - DNA, 174 bp, synthetic construct
  source 1..174: mol_type = other DNA
atgagcgacattgtcaaggtgcgggggaggcatggaacaaagacgctcgacataaccattcccgccaaaatcagcaaagaatacgatatccacgcaggcgacgtgttcaaggtgggcattgtcaaagagaacgattccatcaagatcatctacgagctggtatataaggactga

SEQ ID NO: 10083 - DNA, 165 bp, synthetic construct
  source 1..165: mol_type = other DNA
atgggccaggacgggtttgaaaatgagaccctcctcatggaggccctgaacaacaaaaggttcaatgagcttaacaagaacctgaaagacgtgatcacgttcaccagcgaaaagcccataaatgagaagtacgcagatacacggcactgcctaaagctgagctga

SEQ ID NO: 10084 - DNA, 306 bp, synthetic construct
  source 1..306: mol_type = other DNA
atgcccagacataccccaaaatctaacatttgcaataaactgtcaccggtggattgtataaacaaaatcaaaagtgtaataacggaaaagaggagcatcgggcacggcaacgtgtatggtatttcgggagacaatcaggagattacacagatcaacgaagcgatcaagctcgacaaggggtttcagttcgtcctgaactgcgaaagcgaggcacacctgtcccaattggaggacctcatcaagaaggagctaaccagcaatgagtacatctgtggcgatgcctcccggtgccgcgtgttctgctga

SEQ ID NO: 10085 - DNA, 270 bp, synthetic construct
  source 1..270: mol_type = other DNA
atgctgcccggcgccgagtttagcgtggagaacgtgatgggaatccacgagctgatatttaaggaagtcgtcacccaaaagagggattgtggcacagccatggttgggtcctcaatctaccatcagggggctgaatcccagtgcattgaatacgtggcgagcgccaatatccggttcgactgcaacattagcaacgtgaacgtgctcattaatgagatcgtatcggacttcgcagacaaaggatatggcgtcagtgtggagttcatctga

SEQ ID NO: 10086 - DNA, 252 bp, synthetic construct
  source 1..252: mol_type = other DNA
atggtgttcaatattgacgacattaaaaagagggtaatccccatcgtcataaagtatgggatcaacacctttagcctgttcggcagctacgcccggggcgatgcaaacgagaacagcgacctcgacttcgtgatggataaatgtgacctcaaaggactacagtacgtttcgctggtccaggatctggaaaaggagtttaactgccacgtggatgtgatcagtaaaggttcctcaaataagaagatatcctga

SEQ ID NO: 10087 - DNA, 177 bp, synthetic construct
  source 1..177: mol_type = other DNA
atgaacgagaaagacaacaggtgggcggaaaccatcattggctactgtaatcggattgacgattacctaaaccgctttgatgacgataaggagatctacatgagcgacagcctctataaggacgcctgcgcactggtcatcatccccattgtgaatctgcagataatcttcagatga

SEQ ID NO: 10088 - DNA, 294 bp, synthetic construct
  source 1..294: mol_type = other DNA
atgattagctcagaggaaaaggagaaaatcaaggaggagatcgtggagaaaataaactctgtgctggagaaaaacaacgaatccttccgcctggacaaaataaatgtgctgaacaaaaatgagaccgtaaagttcatggggaattacagggtctacgatcgaaagaagtacgacacggtttccagagaaattaactcgttcctcaagaagtatggcgatgtcgaaatcaagagcaagaagatccgggacagtggaatgaaatttacaaccgtgagcttcaactttgaactatga

SEQ ID NO: 10089 - DNA, 1221 bp, synthetic construct
  source 1..1221: mol_type = other DNA
atgatcaagcgggagctttacctcaaccaaatccgccacctgttcggaagcgactttatcaaggtgattgtcggactcagaagatgcggcaagactagcctgctaaagagcattatcggagaactccaggacaaaggtgtgaagaaagagaatatcatttacatatcctttgagttggtgcaatataagaatatctttaacgcgcaccaactcgatgagctgattttaaagctggtcgaggggctggagggcaaaatataccttctgttcgatgagattcagcaggtggagttttgggagaaatccatcaactcctatcaggcctcattcgactgcgacatttacataacagggtcaaacagcaagctgttgagcaacgagctcgccacacttctgtccggccgatatgtgaagatcaacttgtatccattcagcttcgccgaaatcttacagtacaagcaggagattaatggtttgaagctcaacgaaatgaacctgaaggaactattcaacgaatatctgttatttgggggaatgcctgggttgctgccgatcaaggatgaatcgactaagattaatatacttcatgacatttatgactccatcgtaattaatgacgttctaagccgatataagatcaatgagatcgacctgttcatgcgctttagctactatctgatgaatagtaccggccagacattctcaaagaccagtatcacgaactacctgaaaaacgaaaataaaaaaacctctaggaatactatatccaactttacaaagtaccttgaggattcgctcttctgtaaaaaggtcatgagacaggacatcataggcaagaaactgctcaagaccgaggagaaatactacctggcagaccagggatttcatcacgctctggtggacaacaatagtgactggcttggtaggatactggagaacgtggtttacaatgagctgatccggcgcggctactctgtcaaaattggcaagattaaaaacaaggagatcgatttcgtttgcgaaaaacaggataataagatctacgtgcaggtagcttatctcctctcaaccccagaaacgattgaaagggaatttagccccctgttcgacgtccccgataaataccgggcatacgtgctgagtatggatgaggtgaacctgagcgaaggcgggatcatccacgagaacatcattgacttcctcttggattatgaaatctga

SEQ ID NO: 10090 - DNA, 942 bp, synthetic construct
  source 1..942: mol_type = other DNA
atgttcaagtttgataaggagcagcatgtgtttgactttgccggggtaaaaatgggcgggcaaccgggagagtaccctacagtgctatgtggcaccatcttttacggcggacacaacatcatcaacgatgaacttaccggggacttcgatcatgaaagcgctgagaaattattgaatgatatgatcagcatgtccgacatcactgggaacccttgtattgcccaggttttcggtcagacggaagaggctattgtgaaatacctggagtttgtgggggacctgtgcgatatacccttcctgattgactccacttcagccgatgctagagtcgcgggtgcccagtatgcggacgaggtgggactgactgagagggcaatttacaactcgatcaacatgtccgccgacaagagcgaaatggacgccctcaaagaaaccaatatcgatagcagtataatcctgggattcaaccccatgaatagtacggtgcaagggaagatcgcaatgtgggagaacggcgacgatggcgcgtatgagaaggggttgcttgaagtcgctgaggactgcggcatcaccaaattcatgatggacacagccgtgaccccactgggacagggcgcaggcgttgctggtcgggccagctttgccgagaaggcaaagtgggggtatccggtaggctccggtatccacaatattccttcagcctgggattggctgcgcgactacaaaaatgagaccggcaacaagactgcattcacagtgtgcgatatcggagccaacattctccaggtcatgagctgtggagatttcgtcctgttcggccccatagacaatgcaacaatatgctttccagccattgcccagacagacatgttcattgctgaggctgcgaaggacctgagcaccgaaccaatcgaaacgcaccccatcaataacctcctctga

SEQ ID NO: 10091 - DNA, 366 bp, synthetic construct
  source 1..366: mol_type = other DNA
atggacgaacggtcctataacatctcagagtttgcgatagagggcgaggaggcagtgaagacagtcttttacacgacagacagcaccagcggcagcgtatggtgtgtgaagcccgggcaagaagtcgcatgccacacccacaacaattccgatgacatctggatctgcatacagggggaaggagtgttctacccggagctcggtgacgagattccaattaagaaaggccaggtggccgtcactccaaaaggactgtgccatggcgctactaacaccgggaatgaagatttcatcttcgtgagtattgttgcccctgtgcccgccgattataatcccctgtactcgttcctatttttcatcaactga

SEQ ID NO: 10092 - DNA, 366 bp, synthetic construct
  source 1..366: mol_type = other DNA
ctgagccgcggcaagaggcccaagtggatgatcgagatagctaaggaacggatggagatcctttttaatcgagccgagatggagttcatcaaccatcctgagagatccaatcgatacgtggaactggcactgaagctatctaccaagtacaatacgaagattccggagaaatggggaagaagatattgcaggaactgcaaaagcttcctcagtcccggccgcaattgcacagtccggctcgtgaactccgaagtgaacattttctgtggggagtgtgatcacgtaatgaaaataccatatcacaaggaaaaaaagaacaaaaggcgggccaagtacgagtcaatcaagaaacgcaacgacgaatga

SEQ ID NO: 10093 - DNA, 258 bp, synthetic construct
  source 1..258: mol_type = other DNA
atgagccagagtaaaaaggagatgatgaaccgggctctgtccgcgatgaccatcaacatcgggaagaatggcattaacgaaaatgtgatagatgaaattaaacgccaactggacagcaacgagatcgtcaaactcaaatttgcaaagaatatcgccagagacaaggataagttcatagacgatatcgtgtcacagacaagggccaagctaatcgacgtgcgaggacacgtcgccgtaatttacaagaaaaagccctga

SEQ ID NO: 10094 - DNA, 438 bp, synthetic construct
  source 1..438: mol_type = other DNA
atgaccaccgtattcgacgtccctgccgacctgcttattaagaaggtcgcagacgagtttaagaacaatgataagatcaattcccccgcatggtctaacttcgtgaagacgggggtccacaaggaacgtaaacccgaaaacgtcgattggtggtatgtaaggactgcttccattatcagacgcgtgtacatggatggtccagtgggcgttatgagtttgcggacattctacggcggcaagaaggaccggggggtgcggccggaggtctttagaaaaggcagcgggtcgatagtgcgaacctcactgcatcagctggaagacgccggactcgtggagaaagtggagggcggaagggttgtgacaccagccggacgcagcttcctggataagctaagcgcggaaatcatcaaagacgtgcccggtctcgagaaatactga

SEQ ID NO: 10095 - DNA, 357 bp, synthetic construct
  source 1..357: mol_type = other DNA
atgagcgacctcgatgaaatcaggcagaagcgcatggctgagctacaggcccaacaggccgcgatgcagaaccaagcacagcagcaggccatggctcaggcacaacagcaggaagcccaagccaagttcgagtctcagaagaaacagattatcgcgcagatcatgacctccgaagctcggaacaggctgagcaaccttaagttaacgaaacccgagttggtgaatcaaatcgaactgcagctgattcagtcagcacagtccggcagtctcagaggaaaggtgaccgacgagcagctgaaggtcctgctccgacagatagccgggcaaaagcgcgagatcaaaattacacggaaatga

SEQ ID NO: 10096 - DNA, 585 bp, synthetic construct
  source 1..585: mol_type = other DNA
atgaaggctggtgtgctctacagtgggggaaaggactcgtcttttgtcgcagtgatgctgaaacggttagggctggacgtagaactatgcaccgccaactttggggtgtacgatagctacattcccgccagcaaaagcgccgaagcgctgggtttcaagcacaatgtcctgaagatggattatggcatcttggacgatacttgtgacatgatcatgaacgacggcttcccgaatgatggaatcaagtttatccatgctagaacggttgagaagcttgccgacgattttgacattattgcagacgggacaagacgcgacgataggacccctaaactcaacatcaatcagatcaaatcccttgaggaccgcaagaacgtgcaatacattaacctggacagtttcggccacaagagcgtcaagctcataacttccagcctgttcgagatttcacacgaacgaagcaataaggacaactcctccgatttcgaggtggaaataaggaccctgatcgatgagaaaggcggcaactcattggatatcttcccagagcattatcagacacgggtgataggatataaaaaatga

SEQ ID NO: 10097 - DNA, 156 bp, synthetic construct
  source 1..156: mol_type = other DNA
atgagcagaaataaaccgctagccaagaagctgaggatggctaaagcaaacaagcagaataggcgaatccccatatgggcgtatgccaagaccaacagaaagctgcggtaccgaccaaaacctcgccactggcggcgcaacagcctcaaactgtga

SEQ ID NO: 10098 - DNA, 246 bp, synthetic construct
  source 1..246: mol_type = other DNA
atggaacgcgtttacacaataccactgaggaacgtgaaggagattaaaaggaccatccgggcaccccgagcgatcagagaggtgaagaacttcctgactaagcacatgaaggccgaggaagtcaaaattgatgaaagcatcaatcatgctatctggaaacggggcatccagaagataccgagcaagattacggtcaaagcagtaaaggacgacgacggggtggtgacagccaccctcgccgagtga

SEQ ID NO: 10099 - DNA, 675 bp, synthetic construct
  source 1..675: mol_type = other DNA
atgctgaaacgcgtagacatcgtgggaaacccgaatatcggggtcttcattctggccaccgacgagtacgcgattgtgccttacaatctcctggacgagaaggccgacataatcaaggagacattggacgtggatgtggtgaagtcctcaatctctggctgcagtctaatcggaagcctggctgtcgctaattccaacggcatggtggtgagcccccacgtgttagatcgggagatcaaacagtttgaagacctcgggattaacgtcgcgacggttcccggtcaatataccgcacttggcaatatcattgccgcaaacgataagggcgctctcgcctccccatttctgtctgaaaaggcaataaacatcatcgaggaaaccttggatgtaaatgtcgaatccactagcatggtaggaagtgacatcatcggcagcatgattcaggttacaaacaaaggattcctcataagcagcaacgctgttaagtcagagataagtttcgcccaggaggtctttggggtcgaaggggatattggtaccgtgggaaaaggcattagcctggtgggtgcttgttccatcgccaactcaaagggcgccatcgtggccaaagactcgactgggccagagatggccagggtggaagaggcactgggcttccttgacgatgacttctga

SEQ ID NO: 10100 - DNA, 225 bp, synthetic construct
  source 1..225: mol_type = other DNA
atgataacaaagatttacagagtcaagggaaccttcgtgatgggggatgagtatcataagttcacgaaagaatttaaagcaacctgcgaagcggatatcgaagagaagatctacgaacgcttcggctccaagcaccggatcaataggaaccagattagcatcagcgagatcgtggagattgcccccgaggacgtagtggacccaatcgtcaaagacatactgtga

SEQ ID NO: 10101 - DNA, 435 bp, synthetic construct
  source 1..435: mol_type = other DNA
atggaagaccagcagaagctaaacagtcttctcaacgaaatcaatgtataccggcagcaggctgacctgattcaacaacagatcgaattgatcaggacgagcatggctgaagtggacgcactgttctctgcgctcgatgatatcgagggtaaagagtcggtcgaggcttttgtgcccgtgggagccggctcattcgttaaaggagagttaaaatccaccgatgagatcatcgtgtccataggggccgggcttgccgtgaaaaaggacgctgatggcgcccgcgagatactgaatgggcagaagaaggacctgactgatagcctcgacaagatgctggccaacctgcagcaatgcacagacattgtcggcagcctgcaggcccaggcagagcagattgcagcagcggcccagggcaagatgacccagatgggatga

SEQ ID NO: 10102 - DNA, 6225 bp, synthetic construct
  source 1..6225: mol_type = other DNA
ctgaagaagatactgatattcctattgatattgatttttgccctcagcatcaatatcacattcgccagcaataccactaactcctcagacatctacataagtaacgaggggagtgatttttgtggagacgggtccatcgataatccctatcagacccttaactacaccattgggaaggtctcaaacaacagcaatatttacctcaagagcggaacctacaattctacagggtacgatattgtcaacaaaagcatttctattaacgggattggggacgttacgatcgatggcctcaatggatttatttcccaaagcattttcaagattaactctaacgccagtttgttcctgaacaatattaagtttaagaacggctattgcgatctggacaacgagacgccttcctgcatcatcaatcagggccgactcttcattacaaactccacctttgataacttcaagaccagcgtgggcgtcatcactaacgagaactatctgtgcatcagcaatgtcaagaccagcaacctgagcaactcccagctgttctccgcgccatataagtacaacatccctatccaatttatctacaacatatggtgttgtgatatttataattcatctatcggcgcctcgtacaataacaaaaacatgactctaaccaattcattcatcgagcgttttgtgagcaataaggattatagcaatcaaactagctacgcctactttaataacagtaacgtgcacttgatcaccgctaacgattgtgacatgttaattttcaataatacctatattaattgctactttgatgttgacgataccacgcataccatcgagtactccaacttgatttgggacaacgtaacactctcaaagtacaacgatttattttacttttccctcaaaattggctactctaatctcacagccatttccagctacttcctcacctccatcctcttcctcagctccaatgcaacaatctcctacagctgcatcttgagcaacattatcactgccgtcgttagcaacgtcaacgtgaactacaattggtggggggacaataagggacctaacgtaatgaacggtgagttctcaaagatcaccagcaattactgggtagtcatgatggcggactatgacgacagcctggttaaaatcgacctgagtaaatatacaaacggcctcgatgtctggaacttgaataatccctctaagctgcgcacccggctggtgaagctccggacagagaccgggaacttgaccaagactagcggttatttggagaacgctactttctactctgagctaaacggaaacaacattaacacgatgctttacgcgatggttgacaatcaggttctcagaatcgtggttggggagggtaactctgactatgacttgtatatctccgacactgaaggtaatgactatttctgtgacggatctctggagaacccatataagacccttaaaaaagtcgtgtccaaggccattagtggaaacaagatttacatcttgccgggatactatactctgagttggaatgccaacattaagatactgaaaaatctgacctttatcggcattggcaacgcaaccctctcccgcagcaatgctcgaaacattttcattgtgcaagaaaagggcgtgctgaacatcgagaatctcaccttcacacaggctacttccggatatcacaactactatgaccccatcattcatgtaatcgacggggatgtaaaccttaagaatagtaacttttataacatcaccacgtacggggtggtgttctccgacaaaagcgagcacgtgactgttaataacctgacgcttctaaacgttgaagggccggttgtagtgggtaactctacgaaggtgagtatttataactctaaattcttcaatggaagtgaagcctccttttacgactcatattactcatttctcatcccagtgtgttctaacctgtctgtggtaaattgcaccgtggatggatacaaagggggtttaattaagctaaatccgagatacgaacagatagccgccaggagctatatttataactcaaccttcctgagaaactatcagtacaactacgtgtatgctcctatggtgtccacctatagttacaattacatgacaggattcagtatcatcgagaactgcacgttttgcaacaacattgggaacctggtgttcagtaacatcataaacaattgcacattcgtcagcaataaaaggatacgttacgaggaaactaacatccattacaacgtcaactaccccaaagcgctaatctacgccaagatcattattaactctaatttcaataacaattctttcatctccaagaactatgaggacatggtcatccatggcgatgaggtgtactacagcaccttcatcaataactccgccgcattcggcggcgccctgtctggctccaaggagatccactatagcatatttataaacaacagcgccgcatttggaggtaatgatgtctttgtttataatggggacttaaactgctcgagcaactggtgggggagcaaccagaagccagattccagcagggtgtttgtgttcatcggcaccttggtcctggacgattgggtcatcttgaccatggactacaagaacgacagggtgatcgcatatctggacaacctgctggacaataacggcaacagctatcctctcaaccatgtgctcccatcgcgcgccgtgatttttagtacggaagggggcgagctgacgccctccaataccttcctcgtgaataataaggccagtactttcttaatcagactcacgagtagcgatttcaatgtttttgcccaggtcgataatcagatcacaagtttgacggtgtacaacaacaccacccagatactgatgagtaatgttgtcatatatgggaaggatgtactctataatctgtctttgataaatatcaacggacacaagatttcaaaccaggatctcaacgttatcatcactcacaaaaactcaattatcgactccttcattgtcaccactgataaaagcggggacgcatcatttagcgtcgactacgccatcggcatctatcaggtgaacgtggtctaccttggaaacggctatttcgaagaatgtaactcctccgctactattaacgtctcgagcatcaagactaaacttcaatcctataaccagacatattcaggtaaaaacaataagttttacgcaatcctggtcgactaccatggacggtacctgctgaacagggacctgattttacggatctttgatctcaacgataatctggtgaacacagtggacgttaagaccggggtgggtggaagggcagacgtgctcctgagcctggacgtgggaaattataaaatgaagtgggactacctgggaaatgaatggtacgagaagagcacttgtatatcatttgtgaccatccggcccatcgagacgaatatcatccttccaaacacaacactgtacggaaagggcaatgactacgagttcaccttcaaagacatgtacggaaatctgatttcgaacgagatgattacctttaagataagcaaggaaaatgagtcgagtaagtttagccttatcaccaagaaaggcattgcatcaataaatattaatctacttccaggaaaatacgacttagaagcggtgtatgccggcgacaaggtctacggttcgtcattcgcgtcggcaatcctgtacgtggaacccatcttcgtaaccatgaaccacaactcttaccagtccctacctaaaaatggggtgttcactgtgattctgaaagatatgtacggcactaaggtcagcggtgagaacctatcccttgaactgatcaacaaggacatccacaaagtttacgaggccgtaagtgatgctagtggccaagccaacttcaagctcgacgccccggagggcgtgtattttgcgctgatcaactatggaggtaacatctggtacggtagctccgtgagtgctgtgacgattgagataaactctaacgtgcctatcaatccagtttatatcaatggcagcaatctggtacagtattacggggaggacaagtactatctgatcaagtttaacgacaccaatgcatactcactggagggcaaacttgtcaacgtgctgatcaactctgaggattggagcaactcatacactcttgagagcaatgtcttcggtgaggctagaatccagatagcgttggaacccggaacgtataatatcacttacaattataagaatgaatactatggtctgtttgctcaaaatagtagtactatctttgtgtacaagatgccgaccagcctgatcgccagcaacatgatcctgaagaagggcgactccaagaacctggaagttaagcttgtgaataaaaacggagatcccattgctaacctccccgtcattattaagatagatgacaacgagtacaatataactactaatcagaaaggcattgctaagctgcttcttaacctcgatctcggcacacacaacgttacatactcctttaataataagaattacatctcttccaaggggaatgtaacgatcttggtggtgaatgactcgaagaagacaaccacacttgtcgggaacgacgtgtacacccgcgaagaccagaccataaattatacggtgctgctgtccgatctcttggacaatcccatttcatcctcggagattgtgctgaaaatcatcaactcagacgatattaacataaagacctacaaaggatataccgatgtaaatggcgttgctaccttcaagtttaatctcaagttcggtaactatttcgtgaacgcttattataatggcaatagtgtcaacctgcctagcttcacgactaacaacctctacattaaagtgctggagaactacacagagaccatcctgttcggaaacgatattgaaattcacaacgggggcgacgattactacagcgtggtgctgtctactgtggatggcgaatttattaagaaccagatcatcgagttcataattaagaacaatagctactttaccaatacagacgaaaacgggatagcctatctcaagatccccttttctccaggctcgtatgaggtcttaacgaagttccacgggtgcgataatctcaccagtagttcaattcacaactatatcagcatttacggagatctgttcaatttctactcaaaggatgtggttaaagcctacaacaatggtacccattactacgtggcactgtacgacacaaacaacgaacctctgtccaacaaaacaatcaatttctacgtgaataaccagacatatcaggatgtgacaaacgctgacggctttgtgtgctttgaggtctggctgaacccaggcaagtacatcattaatgccactttcaaaggcgaatatcctgatgaatttaccagtgtggtcaacaacatcacagtcctgcccaccatcatgggggagaacctggacgtttactacaacgaaaatacagtgttttcactattcctgctcgactacaactgcaaacccctcgaaaatacagaggtagtcatcacaatcggtggcgctaaatattccacgataagcacttttgggtcagcaagttggaaattgaaactgaacgccggggtctataacgtgatttgtaagaatcctatcacaaccgagaagatcacccggaaaattaatattaaatccacaataatctcgaaaaatctggttaagtactataaagggtcttctaaattctcagtcacattcaaagaccgcttcggcaatttcagccgaaattccaaagtgaagttcatcatcaacaagaagacgtacgtgaagaccaccaattcgcgcggcatcgtgtccctgaacattaacttaaagcccggcaaatacaccatcaagacttataacctgaagactggcgaaatcaaaacaaacaaaataacaatcaaaacactgataatctccaaaaacaagaaggtaaaggccggtaagaagattaactataatgtgaaggtcttcaattccaaaggcaagatcgctaaaaaagcaaccatcaaatttaaaatcaagggaataacctacaagatcaaaactaataaaaagggcattgcgaagctgaatatcgtgcttaagaagggaaaatacacacttaagacatcttacttcgggttaagcgtgaaaaataaaataactgtgaaatga

SEQ ID NO: 10103 - DNA, 5712 bp, synthetic construct
  source 1..5712: mol_type = other DNA
atgaagaacaaaatattcatcattggactgatcatcttgatcctgttcataagcatttcatccgtgtgtgccaacaacgaaaacagcacactgaatacctctatcaagatcaacaatgatcttaaccagataaacctgggcaacgaaataaatttgatcgacgaagcgcccaaagaggtgcttcaggacgaaagtgagatctcaatcactccccagaactataataagtattttaacgtctacactggtaaattcaagtctgatatcgtctcaagcaagatcaccacggtgaagatagggaatgtgtccaagtgtctgttcgcatttgagaagcccgtcaacttgatgccgatagactctagctgtcaaattaccaatggggtgatacatctgctgcccggaagcgatggatctaccatctccgggctgaaaattatcaacaacgactctgtgggggacatcaagtacggaggtattctgattagccgagcccatggaatatggctgacaaactcaagcaataaccttatttacaacaatacaatcatcataggcaaccagaaggggtgctacgccatgcctatggggtactcgaataataatagaatcctaaacaacactataatttccggtcttacgtcttgcatcgtcatgggccgcagctgctataataacattagcaacaattacattgagatctgcggctatgaacttttcactacatctaacttgattttctttaacccttggggacacgcagactatgacgacggcgtcgccgagtgcaacggaaattatatcgccaataactatctcaaaaactatggaaccggcatttgggcgatcacgctctctcttggctattacagcggagatacccaggtcatcaataacacaatcattaaggggtcatccggtattagcactagtgatatgctgttcacacaacccaaaaatattctcataaaggataacactttcatcgactgtccaataagcatactgacctgttccaacaatgtcacaatcgaaaagaataagatcttcggcagttccgaggacaacgccatctacatccaggccaatgacgctcagctctacaatcactccgtcacaatttcggataattatatagaatttgagaacctcggttgcgcgatcctcgtccatagcgacaatgtaacagtggtgaacaacgagattcacctctccaggtacggcactggaattgggatcagccccaccgacttccctaaagctagctctaataactgtaagatcgagaacaataaactttacctctccggcgacatgggcatcaggatactcggacacaataccacaatatgtaacaactacatctctaccaaggacaaaggcattgtgatttcaagctcgggctataagatctacaacaacactatcatcgccaacataattctctccgatgatgtgccaatctatatcgagggacacgtggtaaacagcacagtaatgtataatgagatcgagactaataacagtgaaggtattcatttcaacccctccggggatctgagtgactacttcggcaaggtgtcggaaaacacaatcaacggaatcatcgagaataccgaaactataattgtgaatgacaccaacttttatgattactttgacttaagcggctacctcaactatgaatttaagccaaactccaagaaaatcatctttttcaccttcttaaccaataaaaatatttacttcacagataaaatttttctgagtagtaacaagatgtacaatcttttgcacaacgtgtcgatcaaattctttgaaaacgccagcggatcgctgatccaagacctgaacttctacaacattgggaataacagtatcatcctcgatggggttaatgacgtctcaatcaacaacaatgactttaccatcctgtcaaataagggcaagaatatttccacaatttccgttattgggggcgagaattgcatcatatctaacaataacatcttcatgaacagcaagagcaatttcactacagcgatttctatcagcaaccctaacggcgccatcattaaaaaactgtcaaaaaactttaagattttcaacaataatatcctgattaagacaaacggcattgcacggggcatttatgcggacagccttgttgagacaaacatcctggaaaacaagatcaacatcatctcggattcgtcggcctacgggatctccatagagaataccaacgagatcgtctataacatcactattgacaataatctcgtggtgatcaattctaaggagatgagctatctaatcaaactgcagatgattggcacctctgacattatcaacaattacttggtgggaagcagtaacggtatttgcggtatcggggcctacaatagcctgaacctcaatataaatcgcaatgagatttccattagcggcaagaaacccattaacttcccggtttttgatgagctcggcagaaacaacgtggctatctatcttaagtccacagtcataaacggattctcaagaaatattttcgacattgaaaatagcacaatcctcatcaaagattcttcatcgatcattaagaatttcaatgtgaactcctacgtgattgcagactacaaccatgatttttactttgactcccagaataagcttaagagcaacatcattaacgacaatagtataattctctttaaaaacttcacttttaaaaagataaccaacattaatatcccggtaatcataaaaccatataaaaacctgaataatttcacggcgacactgattctttccgaaaatgccaacaaatcaagcatctacggcttcaattttatcaacgcaaatatcaatctgaacggggtcgataacgttaacatttttaataactcgttcaagtgcagtgagatcacggacaataatggtctgaataacattatctttaacaacagcttcgagtttaagttaaacaacgcagatggaatcatctttaatggatgcgcaggaggcatcttcacaaacaattatatcctaatcgactctaagaaatctaattttattctgattcgcaaagctaatggcacgaaggtgaacaacaactatatcaacgcgactggggatagtttggtgctgattaagtccgattcgtcagagaacacccagattctgaaaaacattattaacgtgacctctacgggcgattttaacgtgtacaatgcttttaagacgcacttcgataatatttcaaacaatgaaatcaagtgcagaggcacctcaaacagtgctgtaatttactacgactccagttcttcatgtaataaaattgagtttaatgaaattatctcaagttcctccaatggtcgggagtatgctgttgtattcgacaccaagcacgctttgtccaatactatcgcaaacaactacctgattacttctaacgggtacaggcgaggcaatgatgccgtgtacgctatctttgaactcgtctgtaacaacacgcctgtcacgatctatgtgagcattaactcaacggaagacgggaatggttcctttaccaacccctacttaacaatccaccaggccctcgagaacagcctcagcggagccataatctacatcttgcctggttactataaggaatctaatcttatcgtgaacaagaacatcaccctgaccgccataaacaatgacggagctgtgtacattgacgccctgaacaaccagttgttcaccataacggagaaggggagtctgaccattaatgccctgaagatctttaatggatttagcgtggaaggtggaagcttgttcttcaattttggcagcttaatcatcaacaattcagttatttataacagttcctcttactacgacaattccaacccaacctttaaattcaccaacatacagaccccaacgctcagctatagctacgattgcgagaacctgggtctgggaggggccatccttaactatgggaacctgttaatcaattcatccaccctattcgataacttcgcacacaagggcggcctattggctgattttggcaaatcaacaattaaaaattcactaatattcaacaatacggcagtgcatggcggggccatcttcacagactccagccacgagtttaacatcgagaacagcagcttcttggagaacctcgccattcagacactggattactgctacatccagagaaaatctctggactctggcggctatgagtatcgtagtctgtgtgacatgcggccgggatacggcggagccattttcagtaatagctccttaatcatatccaactgcctgtttgagaggaatattgccaaatctggcggcgccatcggccactactctaagatagagctcaacagtaaccggcaggggcccaattactacgctgtgaaccagaatgtgtacagtcagtttcggtatgtgcccaagctgaagatcgaaaattcgatcttccggtacaacgaggcaaaggacaccagttgtggtaacctgagcatgattagcgacaggatgtacaattactactatagtatcaactacaacggcggcgccattttcggctctctgagccagctgaccatcttcaattcactgttcgagcacaatgtagccaataccgttgggggtgcactgtgcgtgcaatgcgaaaattccgtcatcgagagttgtaagttctataacaacactgcgggggaatatgggggcgctatcgaggcctttggcacttaccgcatcttcaacacggaaatactgaacaacaatgctaaaaacggtggcgctattaagtacacttcatacaattcctatgggcatctacaggagatgatgagtttgttcaacgtcaccgttaccggaaataaggcgctctctagtggcggcgcatttattacccaagtggcgaatttcgcaatcactaatagcaacatctacgacaacagtgccccatatggtaacactttttatggaaagtatgggtatgacagtagctccaatatcgacgctcgtaataactggtggggctctgtggatggacctgacgattccgtgtggaactccgccaactccaagttcaagaattggctcaacgagaaagtcaactggcacgttccccacgtgagtgggggaagctcgaacaatgatgagtccgggatcggaaaccagaacaacggtgtcaatagctacatcccatctagcgtatccactgggtcgggggtccataccggctccacactcaccaacaacgtgaagtcttctggcgctagctcaaaagggttctccttcactggaaactggccttccggaaccgcaaacggctttaataacggtgggagcggggaaggtaacgccgtcaattcaaaagataactccggaaacagtcgcacctctatcgccggcaatgttaagaacctgaatagtgttagtaagatcaatagttctaacgtgaacaatctgttctccgtaggtatggacgccaacgctgcagacagctccgcttcctccgcctcaagcagccaggggggggctgatgagtccttctcaaatgcatacgaaatcattaacgaagttaagaaagagaacaaccaaaaatttagcatcttcaacatactgctgattatagcctggatcttctttgtggtgggattctaccgaaaatacaacgataatgagaaggagatctga

SEQ ID NO: 10104 - DNA, 5262 bp, synthetic construct
  source 1..5262: mol_type = other DNA
atgaaatatagcaagcttttcctcatctcttttgtcctcctcttcttcattgtcagtgcggtgaatgcgctggacgcctccgagatcactctgaacgccgacaattctattgacgaaatatccaatgaggatatgggaatactgaatgaggtgtccccctcgaatgatatcaaacatatctatgtcaacgacactggggatgacagcaacatcggtagcatcaacagcccttactcttccataagcaaggccattggggatgtcaactcgtctacaaatacaacgatataccttagcaagggcacctttggaaaaaataacgataccaatttccagtttaccaacgagataaacacttacttcgacaactgcaacgtgacgtttatcggggagggaaccgacaagacatttatcgacgggaagagcacatacaagttcatgacgatcctggagatcacgcctaacttggtttttaaagatattacatttgtgaactttaggggccgggggagttcggtgtttgagctgctggaggccggcaacctcacaattgataactgcgtgttcaaggattcatattctactagtaatggtgatacaatttcatctagcaacagtggggatttaaagatcatcaattcgcaattcatcaattccaatggtggaatcatttccctcctctacgaggatgtctcccccggcactctatacttggagaacaatacctttgtcaacatcaccaactctgaaaacaacggaattgccgtgacgagtaactatgctaaagcagtgatcaaaaacaataagtttaacaatatcacctgtatcaatcagaaccaggtgaccctttatctggaggcccccgacgaagggacactagtgctgactgacaataacttcgttaattgcgagtgcctcaacgaatacttcatggctccagtctatctgtgggcctatgaggaatacgtaatatttgaaagaaatatattcctcaactccactggtgcttcgggcttcaatatcttgcttaacggtagaatggataatctgaatatcagtataggggctgacgagattaacgtgcacaacaacgaaatcaaccacggggtgaacattccaatcaatatcacggatgatgtcggaaacctcgtgctgatcaacagtggaatccagctgaaccttatcggcgacaacaacaattacaccccctatctgtccttaaaaaataagaagctcaccttcgctactgtgcccgagagtggcatctataacgtcactatcacctacaacgatgggctatcaaccaccgaggtgttgacgatcataaagattaacatctccagcagccctgtgaacatttgggtctcgccgaaaggctccgacagcaacaatggcagtgaggagaacccattcaagacaattcagcacgccatcgacacgggctttgaaaagtcattcaacgtcataatatatctggatgaaggaatttactatggtgagagtaatgttaatttgatcattacgaacaaaggtagtcttcaaattatcggaaaaaaatataacaagacgatcattgacggggagcatagcaactggtttctgagtgttgacacctgcgatgtggaagtgaaaaacctaaagttcattaacggggccggaaataaaaatctaatctccggtagcaatctcctgaatctgaaggactgtatcgtcgactccaatatcgcttcccgcaactgctacgtgctgcatcagacactgtttgacaacctgacctataccaacaacaccgggacaatctattacaattataacaggaatataacaaagtcaaacttcatcaacaataagaatatttacgactctacggggatcatttatagttcctgggccccgatcatcattctcgattgcaagttcatcaataataccgccctgtatgactatggtgtaatatacagcaataacaacatcatgagcctgaataattactactatggaaacaaagccaaaaactacggaatcttctacgcctcgtcttacagcagcaacaagatgattctgatcaatgacacatatattaataatcacgtcgacggatcatatggaatcggcatttcaccttactccagcgtcgtcaactgcaagtttatcaataactctgctggcacagatgcgggcatagggagcataacaatcacctgctccttcaagaactgtagcttcatcaacaactccgctaccaagggcggggttttcgtcctgaacgctgtgcagcacgcactgggcaccacctacgaggagctcatcagctttgacaatgtcacttttgagaataataaggctagcatgggggccgacatctatctgccccccagaagttccaactcctactactcctatacataccccattgagctgacaattaccttcgacaacatcacggtgacctccctgaccgacaatctgacggcgagtgtttatggagttaacggaataatcgtgggaggcgcaattcttgaattttacctcaacgagctttatattgggtcttctcagattgtgaatagtaacgctattttggaatacgatgggttttccaacggcaaggctattgttaacggaaacatcattcacccctctgtcaagaacaatataaacaatgccacactggatatcaaactggataacgtactgaaccacattgacttctgggtgtcaaacatagggtccgatgaaaatggcgacggttccaagaccaagcctttcaaaacaattcaatacgcggtgaataaagccttcgagaattgtcgggacatcactatctacctcggagaggaaacatactctggcgagaataacactaacctgactatctcaagtgcaagtaatatcacaataattggcaagggaatcggtaaaaccattataaatggtggcaatagcagctactttgtcaagatcctcataggcattaataagatcattatcagcgacttgactattatcaacatgaccccagacaaccgcttcgaccttcccatcgggagcaccagcccatcaggcatccatagcattattaagagtgggtccacaagcccaatcactgtggacaagggcgccaccctgtatttgaacaacgtgaatatcacagagtgccgtggaggcaatgctataattgatggtgagggcaacatcttcattgataactccatcctgtacaagaatggcgttagcaagggcatcattaagtgcgaaaatctggtcatcaataattcaataatcgataagcacctggtgggagggtaccccatcataggaacgaacattatcataaataacaccaaaatcacagatgtatttaacattatccggaacggcttttatttcatctccaatgccaaaaataccactatcgaaaatacatgtgtgttaattaataattgggagaacccattaaacatactcgatatcattgaatattacgacacccaaatatgtcccgctgcttgcattgcgagcactaacgccatcatcaaaaactcatcattcaaaaatgagtttgaactggtgtacctatggcagtcaaccactgattactcatatcacaatgtttacagcggctccaacatcgaggcagtcaattcttccttcgaagggtaccaattcatcatctatagcaggatgcttcagaacccaatctacaagttcgatggatgtacatttaacaacatcgccaacctgatgattatgatgcagagccggaactcgatagtgagcttttcaaactccgtcatgttcatctcaggcaataagatcgcaagtaataatgcatttaataacagcttcctgttcaacaacaattactggggtaacaatagcaagcccgtaatcccaaactctgtaagcaacttccagatcccttctccagataattggatcatcctcatctcggaaggagaagagccggtgtttaagcttacagatgggaaaaacgtcactgagtatatctgtaatctacccgccaagatatcttatgttgccgacgagaacggtgaaatcattcctgtgttgaatcttaacggcaatggctacaagtttaacgtggacgaaaacgggaatgttgtgctgaacatcagtgccccgatgaaaaacattgtgccgaaagtgcccgtggatgagaccgtattcgcaaatgacattgaagtgattgtaaactcttcttcgaacttcaaggcgaagttcactaacaagtggggcgattccctgaaagggattaatgtgtccttcatcattggtgagaacatcatcaacataattaccaatgagaacggtaccgccatattgcctgtggactttgacctgggcgtctattttgtgaagattgtgaatcccgttaccgggcagttcattttcaagaccattgacgtgatacttgagaacacggtgaccgcaaacgacattatcgtaaagtacaacgataagagcaaattctctgttattttcactgacaaattcggcaacccgctcattaacaccaacgtcaagttcaaagtcggcaagtacattatcaaccgcactaccgacgaaaacggcatcgcctcatttgttatcaacttcaacgtgggcaattatgcggtcaacaccattaacccagtgactaaccagagtattgacaaaatcatcactgtgaacaaaatcgctacgaaattaacgagccctaaattgacggtaacctacaacgccggtaagtacctcactttaatcttgaaggactttaatggcaaagcactcattaaccagaaggtgagcatcaagatcaatgggaaggtgtacactaaaatcaccaattccaagggacgaagcagtctgaagattaatctccctgttaaaacatacattacaaccctcacctacgcaggagaccgcaaccatatcaagtcctctgcaacaaccaaggtgatcgttaagaaggccacccctaaaatgactgccaaaaaggcaacttttaagctgaaaacaaaaaccaagaaatactcaattattttgaaggacaacaggtacaaagtgatgaaaaaggtgaaggtatacctgaaggtcaaagggaaaacgtaccgggccataaccaattccaaaggaaaagcaacctttaagattacaaagctgactaagaagggcaaatattcggctagaatcaagtattcaggcaacaagtacttcaatagcatcacaaagtacgtgaaaataacaattaagcgatga

SEQ ID NO: 10105 - DNA, 492 bp, synthetic construct
  source 1..492: mol_type = other DNA
atgagcggcaaatctaagatcaatgttttcaacaaaatgaccaagactgctctagacgaagagatctccgcttatgtggcctaccaccggtactatcagaggctcatcgcggtgaagatcgtcagtgagggcaatacaattctggatgccgcaaagatcctgggaaagtcctaccagactgtgcatcggtggataaaaacgtgtgagtcagaagggctcgaggggctgaaaccgagttttgggggtggccgaccatcgaagctcacctatgaccagctgatggaactggataagatcattgagaagacacctaacatgagcatgaaggacgtgcacattcttgtgaacgagaaattcaatgtcaactacagcttaaaacaaataggaaaaattgtacgcaaactgggctacaactacagcaaggcctgccccaagttctcaaagtcccttgaagacgcagaggaacagttgaaaaagctgaagagaacctga

SEQ ID NO: 10106 - DNA, 237 bp, synthetic construct
  source 1..237: mol_type = other DNA
atgccacatgaccacctcgccattaacggcaatagcacaatcaccatcaccaacagtagcacagcacccgagatcgtgatggtcatccttgaactacggtgcgcgaacaccaagaataaaaattccactaagtcactgaacaagattattgaggaagtgaaactcacgaatgaggagatatacaaaatcctgatggaaaataacgaaaacaacatagtattcagggagaagctgtga

SEQ ID NO: 10107 - DNA, 1326 bp, synthetic construct
  source 1..1326: mol_type = other DNA
ctgtttgaatccttgaaaaagaagtttagccggacaagcgagaagctagaggaggaactgatcgaagaggctgaaaaggaggacaacctgcaggaagaggagggtaagaagttctctttcttttcctttggaagtaagaaggaaaatatggaagaagacgagagcaatttactcagcgaggcagaagggactgtaggaaaagaaaccgaaaacgagattcccggaggagactcgattgaggaggatgtggacgagaagtcaggcctgctatcccgactccgcgggtcctctgcgaaagagaatattgaggagactagcgacgaggaaaaaatcatcgaggaatcgcaagacgaggaaaaaagccacttctggagcaggaataaggacaacgaagataactccgttgacggcgaggccgggggtgggatattctcttttgttcgggagaaaaccattcaggagaagcatgtggaggacatattgttcgaactggaaatggagctcctgcaaggtgatgtggcaatggaagtggctaatgagatcgtcgagagtgtcaaagaggacctggttgggaagaagatcaaacgcagtaatgatattacagagtacacatttttagctcttaaaaacgcagtatccgacatcatcagcatcccatccaagagcatgaccgagatgatcgaggacaagaaagctgagggggggccgctggtggtcatgttcgtgggaataaatggtaccggaaaaacaacaacgatcggcaagctggcgaacttctacatgaagaaaggttacacgcccgtgattgccgcctcagacactttcagagccggggctatcgagcaggtgacatatcatgccgataacgtgggcgtgaagataatcaagcacaagaaggggtcagatcctgcggccgtggcatatgatgctgtggaacacgcccgtgcacagggaaaagagctcgtcctgattgatactgccggcaggatgcagaccaatacgaaccttatggacgaaatgaaaaagattaagagagtgtccaagcccgacctggtcatctttgtaggcgatgctctgaccggcaacgacgcaaccgaacaggccaagaagttcaacgaggccattgatatcgatggcgtcattttgaccaaagccgacgcggacagtaaaggcggagccagcctctcaatcggctacgtcatcaagaaaccaattctgttccttggcatgggccagggctatgatgatatcatggagtacgattctgaatggatgctcaaccagctcttcagtgacaacgacgaatctgagatcatagaggactga

SEQ ID NO: 10108 - DNA, 1083 bp, synthetic construct
  source 1..1083: mol_type = other DNA
atgaagatcagtaagattaacctgatcctcagcgtggtgctcgctatccttatcaccatggctacaaccgcctcacttctgtcaaatgccaacgactccttcagcaaggctgagccaaaggggaacgtttccatagctatcacaggggacgtgatgttcgcccgcaacatgccgggggtgttaagtgccgattccagccctttttccggcgtcagtaacgtaacgtccaacgttgaccttctgctgatcaacttcgagaacgcggccacctcttctgagaacgccgttaagggggacgtgcccctaaaatgtgacccgagatacgtgccactcgcaaaggggaacaataacacaatagcttccctggcaaataatcatgcctttgattacggcattgatggaatgaaggataccattgaaaacctgaaaaatgccggcattacgcccatcggcgctggggaaaatgaaaaaacagcgcacaacgcagtaactcaggagatcaatggtaggaatatcaccatactgaactatatggactcggacaacttcgctgagtatagctatgacgtcatgccttacgcaaatggttctaatcccggctactccgtctttgacctagcagatgcccaaaagcagatcaaagaaaacaacggctccgatttgattgtagtgtacatgcacttcggaaacgagtatagcaactctccaaatgacaaccaggtgaagatcgcgcatgaactcatagactctggcgcagatgtggttctgggaagccaccctcatgtgactcagggaattgagatgtacaacggaaaacccatcttctatagtttgggaaacttcatctttgaccaatcaaaccccgccacgcacagcgcctactttgtgcagatcgatctggtcaacaatactggtgagtgcagtgtctacccaattgtcatttcgggctacctgccccactatatggactcagatagcggtaattcattactcaatgagttgaaccctaatgccgatgaactggaagtgagcaatggcgtggggaaactccggttcaatctgaccgagggcgacagcaactga

SEQ ID NO: 10109 - DNA, 1740 bp, synthetic construct
  source 1..1740: mol_type = other DNA
atgatctcttgcgtgagtgctggcgacagtgagatgcaacaggtgaacaatgatagtgtggactcagccaaccagtacgtggaaccagtgaagaacgctagcttcagtaaggtgagcaatactaactatctcaaggacagcaacttcacagtaagtctgaaagacgagaataatgaggtcatcgtaaataaaaccgtgtacttcacgattgatgacggactcgtcatcaataccaccaccgacgggaagggcagtgcaaagctattactgaatatctcaaaaggcacccacacggtcaagtacatatttaacgaaacggggttcaccccatttaaatctagcaccaaggtccttgtgatcacaacatcaaactcgaagatcaaggcctcagcttacaagtcttacatcggctttaaaaagcattattcctacgcgaaacacatcagcttcaagaatacatacaagatcaccttgaccgccgatggcatccccctgtccaataggattgtgaagtttaccatcaacggaaagtcttacagtaagaaaacagattcaaagggagtggccagcctccctatcggtctgaaggccggcagataccctattaaattttcctatgccggggagaaaaacatcaaaaaggtctccggaagcagcatcgtgtatgtaattaagggcatgcctaagaagataatcaaagcaaacagcctgacttataaaaataaggtcagtgccccctttaaaataaaattggttaacgggcgaggaaacatactgaaaaacaagaaagtgacattcactctcgacggccggacatacacaaagtacacggacaataatggtatcgcaaccatctacctgaaattatcctggggcactcactccttgaaagtgagctcagccaagactagctattataaaagcgtgctgaagaaatactccatccacataaagtctaaggcggttaataacgggctgtggatgttctcctcggacatgaaaaaggcaaacctggcctcccttaaaaaggttggaaccaagcatattttcctttacgcaaaggcaattgacgtgtggggcaggtcggatgtcgagaagtttatcaagaccgcttccgggtatggaattaaggtgcatctctggatgaaagtgttcaacgacgacaatgataaatggattaacccggtgaaaaagggcaagatcaactatggtctgataaaatccaaaattaacctcgccaaagaatacgccaaggtcaagggggttgctggcatccactttgattatttgcgctatcccggcaatgcctacaagtactccaacggtgtaaatgccatcaactacttcacaaaggctgcaactagtgccattcatgcaatcaactcaagattcattgtcagcgctgctgttatgccggaacccagcgatatgaaatactactatggtcaggacattagcacaatgggcaagtgtctggatgtcatcattccaatgatttacaagggcaattataacgcgggatcgtcctggatacagaagacgactctaaaattcgttaaaaagtcagggcacgctaagatatggtctggaatccagacttaccacagcgatcggtctcccatcaagctgacctcctctgccctccttaaagacgctgatgcggcggccgccgggggagccgacggggtgattctgttccgctatggtctcaccaacctgattaactttaacaagctgtga

SEQ ID NO: 10110 - DNA, 1542 bp, synthetic construct
  source 1..1542: mol_type = other DNA
atgatgaacaagctcagtgtcttcatcgtgatcattatcatagccctaagcatctcctcggtgtgcgcgggcgatagtgatcacaataagacggacgactccattctcggggaggcggatacgtcaacgtccagtaatattacgcggattggcgtgaatagcatatacgacgacggggtgaatgagaccatcaagaccaattccagctttgtgagttccaacgtggtaacctacgaaaccttctccaccaagataaccgtcagattactgtcgaacaacaatccactgaacggaaaaaacatcatcatcagcgtcggtaacgtttcatacaataaaaccacggacgccaatggcaaggttgtgttaaatgtgaaactcgccaaaggcaagtataacgccatgtttagctatggcggggatgaaaacattaacccctgccagaagacaaccactgtgatcgtcaagactcccatcaaaacaaaaatctattgtgccgataagaacattaattacaggcaggacctcaagaataccttcatcgtcagattgattgatgggaatggaaaggcactgaaaagtcaaaccgtcactttcaaggtcaatgggaagatgtacattgcaaaaaccgacaaaaagggttatgccgaggtgtgtctcaacctgaaaaaggggtccttcactgtcggatttagcttctacaagaaaagcccgtacagccactcccacggatcttacaagatcaaggtaaaggctccgatcggcaagggtaacgggtattggctttggccagcccacatgaaacacctgaacctcaaatccctgagcaagcttggaacaaagcatatcttcctgcacgtgcaggctatttcagtttacggaaaatcgagcgttatctctttcgccaagaaagcacacaggtatgggatcaaagtgcatctgtggatgcaggtgtgctgtatccgcggggacaagtgggtgcggcctgtgaacaaggacggtagctttaaatacagttttataaacaaaaaggtcaaagaggcaatcagctacgctaagatacccggcattgatggggtgcacctggattacgtccgcttcggcggcactgcccatctgtataagacaagcacacagtcgataaactacatcgtgaagaaaaccagtttgggcatccataaggtgaaacctaactgcattgtttctgctgcagtcatgcccgaaatttcaaagatgatcagctggtacggtcaggatattcctacaatgggaaagtatctggacgtgattgttccaatggtgtacaagggcaactttaatcagaaaactgcttggatcacaaagatcgtaagtaagtataagtcacaatcaaaaagcgctgtaatctggggcggcctgcagacataccactcagacaataacgtgaagaagttgtcctattccgccctacttaaggacgcaaaatccagcaaggccggcggagcgaccggtagcatactgtttcgaattggactcactcattatctgaacttcaaaaaagtttga

SEQ ID NO: 10111 - DNA, 378 bp, synthetic construct
  source 1..378: mol_type = other DNA
atgaacgccttcgataagtttctcataggggacacatcaagcattaattggtgtttcgaaaaccgccacttcctggacaggctgcaggataatggaatctcccggcagtacgtggtggattgcctaatgaacgaggagcccatcaaatacgagcatattgacagcagcacttatgcggccgtctatgacgccccatcgaacaaggattacaaagagatccgaattttgatggctgtgagtggcaacagcatcgacctcgtaacgatcatgaggaacaatgaaaccacaaccgagcggcagaagagacaataccagtcccagaagcacaagaatatagaaaaaaagcgcctgaacgcaatcagtaagagaaaatggtga

SEQ ID NO: 10112 - DNA, 1455 bp, synthetic construct
  source 1..1455: mol_type = other DNA
atgtctgaacagccgcagtgggattcaagcatatcgtttatcttcgccatgatcggagcggcggttgggcttggtaatatctggcgattcagctatgtgctgtacagcaatggcgggggatcatttttcattccttatcttattgcaatagctattatggggattccctttctgattttagagtatggtgtgggcttttccttcaaggaatcgtttagcagtatcatgagaaaaatcaagccggagttcgaggtgatcgcctggatcttggtcctgttcgtgttcgtggtgaccatctattacctggtcattctcagttgggatctggtctacctatttagtagtttcacatttaactggggcaccgatactgcttcctactttgtgaacaccgttggcggcagctctgacctgactaatgccaactttctcttaattcctacgaccgtctgcgtgctattattgtggatctccgtctggttcataagccacagggacgtggacagtggcattggtcgggtatcgaagatcctgattcctgccctcttcgtgatcatgggaattatcattgtatacgctctcacactgcccggaagcgtggtggggataaacgccctgatccatcccaactggaatggcctgctcaacgtcaatatctggcttgcggcattcgcgcagatcatattctcattgagcatgggacaggccatagccattacatatgcctcctacctgcctaagaactctaagttgatcgacaacgtgctgattgttgtgttcgctaactctgcttttgaggtctgtaccgcattcggggtattctcaatactggggtatatgtctttcatcaacggaacgcccatcaccgacctgatcactgagggcacggggctggtcttcatcgtttttccaatgatcttcaatattatggggtcagtgggccgcatcctcgctccaatgcttttcctggcaatcctgtttgccggcattacttccgcccttggatattttgaacccatgctgagttcaactagcgcaaaactaggatggtcccgcaagaaggccgccagtgtgctgtccattattgggtgcgctttttccgtgctcctaacaaccggaatctccagctacgtagtgggtataatcgacagctttgtaaatgaatttggcattctgctgctgatcggcgtgcagtgcataatcttcgcctgggtctacggcgttgagcacttcttgcccctcctcaacgagtactcctcttttaccgtgggtaagaaatggattttcgtcatcaaatacttgctcccattcgttctcatcattatgtgggtggtgggcattgtgcaactgtttacaaccgcagacgtcttcgagatagcaatcgatttgatcatcatcgcctccgtgctggtctctgctgttttccttacaaaactcaagccaagcggggaatga

SEQ ID NO: 10113 - DNA, 222 bp, synthetic construct
  source 1..222: mol_type = other DNA
atggtcaggaacaagcgcctgaacgctgtcatcagttttatcttgcccggccttgggcagatactcaatggtgacgagaaacggggaataaagttcctaatcgggatggttgtactccacatcgtgatttactacgccctgaacaatgtggtgggcagcatgatttccacactgtaccatgcatatagcgcctatgatgcgtacaaaacctgcgaaatgtga

SEQ ID NO: 10114 - DNA, 732 bp, synthetic construct
  source 1..732: mol_type = other DNA
atgcagaatactagtaagtactttaacctgtccgacatgatggtcgaatacttcaacttcgagaataaggagcgggacatcccatattacaaccataatccacgcctcaccaagcacgcttggatcgtgctgctctccagcgtcctaatctcattcatcttctatgccctgttcgaagatgtgtctgaattttttgccagtttcatattctgcgcgattctgctcgttcctttaatgtactactccgactgggacttctccctaatctttcacaggccgacgaagagcgaaattaaactggccttgatcctcttcatcggttacctgatttatgcaatcatactggggggcgtgatagaggccctgctgagcattactacaacgaccagcgagctcacagttaacgcagagagcctgatttcgcttgtcttttcaatgatggctgaggaattgattaaattcatacccttcgtgtttatcatgagactggtctataaaagtaccagcaaccgaaaattgagcatcatcacatccacattcatcgtgctcatattttttggactgctccactacgatttcgagacctcaattattagcgtgctgctgctccagggccttggatcgttattcgagctgtatgggtacatcaagactaagaacctgtttgtaccctaccttagccatcttctaaccgatgccgtgatttttatcctcatcctgttcggcttgtga

SEQ ID NO: 10115 - DNA, 435 bp, synthetic construct
  source 1..435: mol_type = other DNA
ctgaacaaaaagattatcggcgttcttctcgttctgatagcggccgtggcttttgggtccgtggtgtatgccgccgagacggtcactatcggaggattcgacttcaatgtgccagacgggtttacagaagataagagccacgaaatcgtaaacatggagaaagagcagggcggaatcaaatacattaacaacggtaagctcttcgagaacgacaagggggatgtggtaaatatactagtggccaagtatgatgggcacaaggtcaccaataaaattgccaagggcattgctgacgagcccaagacaatcggcggtgtcgacggctacatagtgcataacggcacctttactagcttcgactacgcaaaagaagggaagctggtcgtgatcaccaccaacaatgaagatgcaatcgagggattcattatcgagtga

SEQ ID NO: 10116 - DNA, 627 bp, synthetic construct
  source 1..627: mol_type = other DNA
ctcaacaaaaaaatcattatcgccgctattatcgttgtcatcatagcggttgtggcagggttcatgctcacctcatcgaatagccaggacaattcaaaaataaccatcatgggcaacggaagcattcacgagaacggcactatcggaattaagctgacaaacggcgagaacaccgccctgaagaataagaccgtccatgtgtgcgttaaggactcagaagggaaaatcgtagtggacaagactgcgaagacatatgtgaacggggtggtgggcgtgaggcttaccaatgtgagcgccggagagtacgatgtgaatgtaacatttgagggggacgaaaattacacgtcctccagcgtctctcagaaactgaagatcattgcaggcgaatcggatgacgacccgacatatcccgtcgacgaggacacggtgaccacgactgccgacgccagcagtactcagtcatcccagtcctcctctcaaagccagtcttacacaccaagccggagtaatgattatgggggtagcagtagcagtgatgacgatggtggcttggatgctgactacgatgagaacggcaacgagatgctacctaccgtcgatgaagaaggaaacgaggtgtccaactga

SEQ ID NO: 10117 - DNA, 477 bp, synthetic construct
  source 1..477: mol_type = other DNA
atgagcttcaataagaagaccatcatcatttttcttattttaattagtgcgttcctgatcatcggcagcgtctgcgccgagaatttgaaggatttcaaagccacaaagatgctgaaaaagctgaccaagcagaaaaccctcacggtgaagatctacaactttaagcctggcgtcctgtgggcccccaaagctataaagctgaaaaacggcgacgccatcgcaggctatgtggaatataagggaaacatgcagtttgaaaaagggactgggataacgtcctggtacatcggatcgggtctcgacggagacatcgagccgcaccacacaaagctcattaaggcaaagttcttctttaaaaacaaaaagggcaaggttaaaaccaagaccgtgaaaggaaatgggggtggccatattagcacttcactaataaaagggtatgtaccatacaaggctaaggtgtcctacaaaacatactga

SEQ ID NO: 10118 - DNA, 1686 bp, synthetic construct
  source 1..1686: mol_type = other DNA
atgaacttcgaaaagtccattggcgctcatgtcatattctttgacgggaactattgtgtgaaggggtacaacgacagtttcgccaatttttttgacattgaagaggacctgaccggaaaacacatcgatgacctggagatgcctgctgacttcgcggacttcattctctctggggaggaggaaatcgagctgagcttaaacgtgaagaaccgctggattgatgtcaagaaagagaccattaacaccaatggggcccttatcggtcacttctttatcctggaagacgtcacggatcaaatcattaacaaccaggaactgattgccctcaatagcgttattggggacgtacaggacgtcatgtccatgagcattcatttcaaggatgctgagggtaagtatcactggactccggagacttacgcgttgattgaccgtgaaccaaggcttggagacgagaataacaacatctttgattctataacagtccagaatttggataacatcgctgataaccgccccaacatcgacgatgatgtgtacgtggaggactttacaatcattactgaatcaggtaaaacgaaatacctgagaggcaccgcccacaatgtgttcgatgacgaggggaattttctccggcttatcatgaccgcacaggatcttacaaaggagcacctgcaggaggcaaacctaaaaattctggatagtctaatgagcgatagcaactaccagctcggcgtgggtagttatgtgcacgagataggcagtgactatttctgcatctcgaaggaggccgttgacattgccgagctaaatgagaacgaagatagccacatgcagctgaaaagccttagtggaaattttgttgactcggacgccttcaaaaaagaagtgggcaaactgatatcaggagaattggacaaaatcgacaatgtgtgggagtacaaatccccaaagacaggccaaatcaaaaagttacacgtaatcaatagcatcaaggtcgtgggcgggcgaatattctcattcggcggaatcaaggatgtcacaagcgagatggaaaaacaagagaagctgaagcatcacaacatggagctggaaatgctcatacgggaaagcaaccataggatcaagaataacctcaacctgctactgaggttcatctccctcgaaaagcgcttcaataagaataaccccgagaagattatcgagaacacggttggacggatcgagtcattttccctgctgcatgaaaagatttataatgtggacaattttaaggacattaatgtggaggagtacctgaacagtctcatcagcgggctgtactcgatctttggcgatgacggcagcatcaactataactccaacaacaacgagctgatattgaactccgaaatcctggtgccactgtctctcataatcaccgaactggttatcaactcaatcaagtacggctacgtggactatgagctcgataataaggcaatcaatgtcagcgtggacaaattcgataataaactgatattgcattacagcgataatggcaagggattgcctaaggacttcaacccccacaagtccattggtctcggctggagaattattaacagccttatctcccagctcgaaggggaatacgaggtattcaatgatgacggaatgcactttaaattaaccttcaacatctga

SEQ ID NO: 10119 - DNA, 429 bp, synthetic construct
  source 1..429: mol_type = other DNA
atggatgccgctaaatataacatcgaggaaaatgtaatgaagacactgaatgtcgtggcagcaataatcaagaaggacaacaaaattctggccaccaagagggggtacggcgagtttaccgatatgtgggagttcccaggcggaaaaatagagaacaatgaaaccaaagaggaggccatcatccgcgaaatcaaggaagaacttgactgcgtgatcgagcctacaaagttcgccttggacctggaataccagtatccgaccttctacctgaagatgagctgttttgaggctataatcaaagagggtactcccaaactcatcgaacacaacgatgcgaagtggctaacgaagcaagagctggacagcattaactggattcccgccgacattcagatcattgactacctcaaggagactatgcgggattga

SEQ ID NO: 10120 - DNA, 150 bp, synthetic construct
  source 1..150: mol_type = other DNA
atgattgacaaacggttggaactggccaagaacaagaaggtcgagctggagctgaagctaaagaaagtgaaaggcacccccagggaagaggatttcaagctccaaatcgaaaaactggagcagcttatcgaacacctccagaaggagtga

SEQ ID NO: 10121 - DNA, 2958 bp, synthetic construct
  source 1..2958: mol_type = other DNA
atgaacatggacgagatcctgaacggtgcccggaccgcgtttattgacgaaaaactggactccagcctagatttccggcccaaactattgcataacggcaaggaaaccaaagtcattaactcaattcgagacgaactgcagaactgtgacgaatttataatatcctccgccttcatcaccctcagcgggttgactcccctgctggaagagtttaggaacctggagcagaaaaatatcaagggcaagattctcacaaccgattacttaaacttcacagaaccaaaggctctgcgcaaacttcagcaattcggtaatatcgaagttaagatctacagtcaggaaaaagaagggtttcacactaaaggctacatctttaagaaggatgatgtgtataagggcattgttggcagctcgaacttgaccatgaacgcactgtctgtcaataaggagtggaacgtggaatttacctctctaaaggagggggaaatgctgtccgagatcaaaagcgagtttttcgccctttggcgcgaagccgacgatttaaacaacgtgctgcccgagtatgagaagatctacaacgacaacaaacgtttcacggacttgaggaagattacagccgaaattaaaaagaaaaacatcacactgactccaaatatcatgcaggagcagttcattgaaaacctccgcaagctcatcaaacagggggaaaagagagctattctcgtatcagcaaccggaactggcaagacctacgcatccgcttttgccgtaaacgactttaacccgaagaagcttttgtttctggttcacagggaacaaattgcaaagcagagcatcaatgcttataaaaacgtcttcaaggaccacgagaatttcggactcctgtccggaaactccaaagactacgataagaactatcttttctcaacaatccagacaatgagcaaagatgatgtgttcagacggtatgataagaatcatttcgactatatcattatcgatgaggtgcacaaagccggtgccttaagctatcagaagattttccaatactttgagcccaaattctggctggggatgacggcatcacctgagaggactgacggcttcaacatctatgacctgttcgataataatatcgcccacgagatccgcctccaggaagctctcgaggaggacctcctgtgcccatttcactacttcgggatcgcggacgtggagttctgcgacggtgagattgacgactcttttgaggactttaacctgcttgcctccgacaagcgggtggattacctgatagagaagtccgagttctacggatactccggcgatcgccggaaggccctggtcttctgttctagaaagaaggaggcagagctgttgtcagacgagtttaaccgaagaggttataacagcacggtcctgacaggggacgatagccaggagaaaaggatcgaggctatcgatagacttaccaacgatgagaatccggacaagctggagtttattttcacggtggacattttcaacgagggagttgatatcccggaaatcaatcaggtcctgttggtgaggccaaccgaatcgccaatcatcttcatacagcaactgggaagaggacttcgaaaatatgagaataaggagtacgtggtgataatcgatttcatcggcaactataagaacaatttcatgattcccatcgccctgagcggcgatcgatcgtatgataaggataagatccggaagtacctcatggaaggcaacaaaattattcccggtgcctcttccattaattttgacgagatttcccgcaagcgtatatacgagtccatcaacaacagctcttttagcaagatcggcgtattcaaggaaaagtacaataatctaaaatacaagctcggccgtatccctagcttgcacgattttgctatcaacggcgaatttaaccctgagctgatcctcaaccactcccgattcgactcataccataacttcctcgactacgttgataatgattacaatagtaccctaagcgacgcagaagttgccagccttaagttcatttccaaaaagctgataaaaggaataaggcctcatgagctggtgatcttgagttgccttaaattcaataattacttcactgtgaatcagatcgagaagtacctgaatgagaagtatgggctctcaaatcaattcaaatcgataaggaacgccatcaactacctgagtatgaatttctaccggaaggagaccagcgatgactaccaagccaacactgtcacgagttttgtgtcaaaggaaaaaatcatcgactatgaggacatcttcttcaacttcgacgaagaaatctataatgacctggagaacaataaggactttaaattcgagattagccattacttcaagtcctgtctgatcaaccccgtgtatttaaatcactttgaggacgctgtcaagtacgcgatattcaagtatgctcaggtgtacaaaagcaatgataaattcagattatacgagaagtactcacgggaggacgtgctgaggctcctgaattgggagcgcttcatgaatgcgcagaacatcggaggatataaagtcaagtacaacacttgccctatcttcgtaacctacgacaaaaaggatgacattagcgaaaccattaattatgaagaccagtttctcagcaaacagctctttagctggatgagtcgcaacaatagaaagataagcagttcggagctagagcctattgtcaactacacagacttggatatcgagctgtttatccagaaaagtaatgatgagggcattgaattttactatgtggggaagctcacacccctggaacatgatcagctttatcgggaaattgaagggaagcagcacccaattgtgaactttaaatttaagataagtcccgaggtgaaagacgaactgtacagttattttataaacgactga

SEQ ID NO: 10122 - DNA, 1182 bp, synthetic construct
  source 1..1182: mol_type = other DNA
atggccagtttaccattgggaaatgacaacgacctggatgacacacagttctataatcgtgtcgaggagatctcattcatctgtgataatctggaactcactaaaaagggaagcactcccaccatcctgcttaccggcattcggggcgtcgggaagacggccctgatgaagaagctgaaaaaggactttcaaaacgactacctggtggtgtatatggacctgtcggcgatggacaagttcaaaaagaacgaactaacccggtttagctttatgaagctgttctacgagtcaatcatcaaagccctgaggcactccaacatcatcaccattgacacacagatcctcaaatacttcaagacacgcaattttaagctggataaactcaagtccgttgataaaatccccatcccgattctgaaaagcgaagaggattacgccaagttcacgactttcgtaatggacctcccccagcagatatacgatgattgcaaggaccacattgatggtgttctcatattcatggacgagtttcagatgttgaaacagcttgacgaggacgtgaacggattcctgtggtacatcagaagtgtgatccaatcccagaaacacattggctatattttttccggcagcatgagcgtgaaggatgagttgatcgcagatattgcggggcagaagggcgctttcggcggtcggatactgaactatgaactgaagaccttcccattcaacacaaccgagaactacctcaaagagaaggccaactacctgaagttcactgacgatgggatcgaaaggttttataagtgcacaaatggaatcccctattacgtgaacagttttgcacgcctgctgcctcctaacgaagagcttaatgagaagaagataattagcgaatttaaaaaagccctgccttatctactgatccatttgaccaatgaatggtacaagctcaacaatcaggagcaaagaattatcaccgctcttgtggagaaaccactcaagcgaattgaaattgctaacaagttaggcgtcacaagcggagccatcggggcttccctaaaatcattgcagaacaaaacgctcatagagcttgataaagacgggtatatgatatacgactctatcttcaaggcatggctcaagaaggaatacgaggagaaaggtaattatccgtactga

SEQ ID NO: 10123 - DNA, 939 bp, synthetic construct
  source 1..939: mol_type = other DNA
atggataggaagtacctgcgggaaaacaaaaactccttcaacatcgtgaaaaactctaagatttacgccaaaataacggcctatgaggatactatttttattagggacctgctgatcaaatatgactggaaccttgataaaatgcccagtattattaagaacgaggaaaagtatctcgtgctggccgtcatcgacgagaaactgcggctgctcgcgaagtacaatacgcgaccggactctcaggtaatcaccaagctgatcagaaaattcaagcgcaatcctaataactcagcctacggtttaaacatcaccaaagtgtttgatacctatgtcatcaagaagcagattgcgggagacgagtacatcttcggatactacgataatctcgacgacgctcaattcgtgcggaacattctgttggacaacaactgggacgtgaacatattcaatgaaatcgaatttgacgacgagacacttaactaccgtgtgatcagtgtaattgacagcaacgtctatgttctgggcaatttcaaggctaaggatgagatcgatatcaagaagatccgcgaggaatttctcgccaagataagcaagcataagtacggcctcgcaagctatccccacttggacctgctaaaggacaaaatctccgaactcgaggagaaattcaatgtcaaaaccaaggatgggatatggtcatttgagaatatcagcgagaacgaatccgtgttgaatcagattattttcaatctgactccattccagcaagctgttttcgacgcaatagataagaatacaagttacgatcagatcaaaaagagccttatcaggtataactccaaaaactttgacaagaagatcctgagaaacctagatgggctgatcgaactgaagctcatagagaaaattgatgacggctactcgaaaacaaatttatga

SEQ ID NO: 10124 - DNA, 189 bp, synthetic construct
  source 1..189: mol_type = other DNA
atgcccgtgattacaatcgccggcaacaagggaataacgatagaaaagaaaagggaaatggtcaagaaggtgtccgaggtggtcagcgaggcatatggtctgccaatcgaggccatcaccgtactgatccaggaatacgacttcgacgatattggcgttgctggggagctcctaagcgaccggaaatga

SEQ ID NO: 10125 - DNA, 459 bp, synthetic construct
  source 1..459: mol_type = other DNA
atgcttggtgaacgcgagctggtgaagctctttcccgacttcgccgacttagtccagcctagcggcattgatttggaactggacaagatatacacccaagaaagcggcgggagcctcattgataacgaaaaaaacctgcccgagatcaaagagatggatggaggcatctacacgctgaaaccacacactgcatacctagcgagtataaagaggaagatcaagatcccgaagggatacgccatgctttatctgccaagatccacactgctgcgaagtttcgtgtctgtccagacagccgtaggtgaccccggattctatgggaccctcatgttcatgatttacaaccatggggactacgaatataaaatcaagtcaggcgatcggatcgcacaggctgtggtctttcctgttgtggggtccggcgagtacaatggatcgtatcaggaggtggaggagtga

SEQ ID NO: 10126 - DNA, 1536 bp, synthetic construct
  source 1..1536: mol_type = other DNA
gtgaacgtcgccgacaatatcgtgaagatcctggaagaggagggaatagaaaacatcttcgggatacccggcgagcagatcatgccagtttacaaagccctctcggaaagcaacattaatcacatcctcacacggcacgaacaggccgccgcccacgcagctgatggatattataggagcagtggcaagatcggcgtctgcattgccactgccagccccggtgctttgaactttacaatggcagttgctactgcgtttaaagataatgtccccttactcatactcacgggggataatgagctcaagtacagagggtccgatcatttccaatccaccccgcaggtcgacatctttaaaaacatcacccgggcatcttacaaccctctgaatggaactgaggccatgtatgtgctgcgtgccgctatctatgagctgaagaccattccgaaggggcccatccatatcaacctgtcaaaagatatactgcttcaggaagatttcgatgatttcgagctgtgctacctttgcgaggaggatctgagcaacataagcaaggctcaggagcttataaacgcctcagagaaacctctgctgatcctcggtgccggcgcaattagccaaaaggagaacatcgaaatgctggcacatatgtatcagatcccagtcacgaccaccttccacgcaaagggaatcatcagcgaggaagatgagatcaatctgggcatcatcgggatacgctccacacccaggagtaagtacgcaattgagaacgccgactgtgtgattgcgcttggcatcaaggccagcgaaagaacgctgcccgaaatcccaaagaatttgatccatgtgaacattaataaggacgttcttattggaaattgtcctattcagggaaaggtggaagacttcctgctgaaaatcagctttaagaaggccgaatggctgtgcgaaattctggagattaataacaaaatcgagatcgaaggtttggacgtggactttaaacctcaggcctccattaaacgaatcctcgacaagtttaacgacaacatcatcgctgcggacgccggctcccacaccacctggaccaccctgctgaagaaaagcctgaaaccgggccaattattgttcagcggatcgatggctccaatggggtacggccttccagccgcgattggtgctgcaattgcaacagacgagaagatcatagtaatcaacggcgacggggacttccacatgaatctgcaggaactcgctactattcgcgaaaacaacttgaacatcatcatcttcattctcaataattcagagtatgggattatacggcagtggcaggagtccatatacggcatgaaaccataccaggtgaagctaaataaccctgacttcacaaagctggcgtcaagttacggaatcgatgccattaaggtggacaatctggctgatttggaactaattctagagaaagagttaacaggccccctcgtcgtggaggtaattgtggagagtgaggacattcccctccctaaaaactga

SEQ ID NO: 10127 - DNA, 258 bp, synthetic construct
  source 1..258: mol_type = other DNA
atgaaggaaaatatcaagtccttcattctagacatcgctaacatcaaggagataattgagtatgacttctacgagacgtgcggcttcacattcgtgttcaaaagcgaatttctcaaggtgaagaaccagatcaacagcgcaaccattgcgcccattgggataatctactatgaaaacgaggagtactactttgccccactggccaacgatgtaaatgtggacatcatcgtcaaaaattatctgaaatttaaaaactga

SEQ ID NO: 10128 - DNA, 558 bp, synthetic construct
  source 1..558: mol_type = other DNA
atgatcatcctgatcatcttcttttccattattgtgctgctctatttcggcgtgaagataagccttatctatgataaaaccgacagcaagcttgaagggtgcctgcaaataagcattcttcgcaaaatcaagatctacacattaaacctctccagtctgaacaaagataagaagaacgacgagaacgaaaaaaagaccaacaacgacatcaaacagctgtttaagctactgaagccctgcttcggaccttttaaactcttcctgaagagcttcatgaagtgtattaaggttcagaatctggaaaatcacctcatttttggcatggactcatacactgacacggcaaaatacattggatacatttggagtttcatcatcatcataaatagctcgcataagaacgccaaactcagcgcggagccgtcatttaatgggattgtcttcgatgtaaatggcatcaacgagctggagataaacatcttgaagttgatccccccagtgttgcggctgatttccaaaaaagaagtcaggacactaatcaaggaggtgaagaagtga

SEQ ID NO: 10129 - DNA, 405 bp, synthetic construct
  source 1..405: mol_type = other DNA
atgagcgagaacataaaaacaacggtggaggaattacgcaagcttatcaatgtcgagaatgtggttggacagcccatcgaaacagaggacaaactgctaatccccgtaatgaggatgggcgttggattcggcgtgggggaaaacatcctgggtgctgacaagggggacgccgcaggggccggcgccggcgtggaacctatttcaatggtcgtgattccgaagaaaggcaacgactccgagggagtgcgggtgctcaacctgagcaaggggaaccagaccaacaaggcactgtccgatctcggtctgctcatcagtgatttggtcaagaattatataaacaatgatgaaaaaattgacgagagcgagtacatcgaaccagagtttaccactgcggatgacgagtga

SEQ ID NO: 10130 - DNA, 1143 bp, synthetic construct
  source 1..1143: mol_type = other DNA
atgaacgaaaccctcctgatgcttcccgggccaactacagtacacccgagagtgctggcggccatgtcccgcgctgttgtgaaccatcgcggcgctaagtacggcgaaattctgtcggaaacgaataaactgatggcggacgtgttccaaaccagcaatgatgcttatctgttaacaggctcgggcactgcggccatggaggccgggatcagtaataccgtggcttctggggagaaaatgctcaacattgtgggaggcaagttcggtgaacgtttcatgaagatcgctcagacccatggaatagacgcgcaggaactcgcagtcgaatggggaacagctgtcacacccgaggcaatcaaggaggccttggacgcagacgaggatattaaggcagttagcgtcattcacaacgagacttccacgggagtcgccgccccgattgaggagatagggaaagtaatgaaaaattacgatgcattgtacatcgtggatactgtgtcttccctcggcggagattatgttgacgtggacaagtttggcatcgatgtctgcgtcactggttctcaaaaatgtatcgccgccccacctggaatggccgccatcacactgagcgatgacgcctgggctgctgcagacaaaattgactcacccacattttaccttgacatgaaagctgccaggaagagtggcaacaaggtgccaccccagacgccctacacccctgccgttagcctgacctatgctatgaacgaggccttgaatatggtgatggaggaggggctagaggcccgagtggcacggcaccacaaggccgctgaagctagtgttgccgccgtgaaagccctcgggctggaactgtttgctgacgaagcagtctcaagcgcaacagtgacggccgtaaagatgcctgagggcatcagcgacgaccagttcagaggcaccacccgggataaatacggtgtggagctggccggtggccaggaccatctaaagggcaacatcttcaggatcggacacatgggaaacatttcctacaaggaactcacccaggcgtttgccgcgatcgggatgacccttaagggtctgggcgtgatagaggatgccggggcgggggtcgcatccatcgcagagtcatatctgtga

SEQ ID NO: 10131 - DNA, 675 bp, synthetic construct
  source 1..675: mol_type = other DNA
atgaattttttctcctgggggaagataaatttcaagaggatgttccgctatgcggtgggtctgtttgtcatgaacattggaatcgccctgtcaatcaaatccaacctaggcagtactcctgtggtggccgtgccctatgctatcagcctgataacttctgtcgatctcggctactgcaacatgatatttcaggggttccttgtgcttgtggagttgattctcctggggcgggcctttaagccgaagcatttcctgcagttcttcgttggagtaatcttcggaatcttcacaagcctgtcgatgtttatattgagctttttgccactagctaacagtctgacctttcagattatcttcctcatttccggcatcgtgctcctcgccttcgggctgttcttatacgttccaatgaatgccgtgcccgtgtccgtcgacggcgtcacacaagcactggcgatcctgacaaaccagtcatttgcaaagaccaaaattatctttgacatatctatgatcagcatcagcctcattgtcctgttcaccttcaccggccacattaacgggagtgtgggtattgtaacgatcatcgccgccgtcagcattggcgcaacggtgaaactgatcaatatcgtttacgctaagatctctggaaacgaagctgaccttaagaaaatgtga

SEQ ID NO: 10132 - DNA, 651 bp, synthetic construct
  source 1..651: mol_type = other DNA
atgtgggtgaagcgaatattgtcatttgttattgggttgctgatcatgtccttcggtgtggccttttccattgtgtcccttctgggcacgacgcctataagtagcattagctattcgctggcgcttatcaccaacatcgacattggaattacaaccttcatcttcaatgcggccctgatcgtgatgcaactgctgatcctgaggagcaagttccataagaagcgcctgctgcagctgattaactgcgtgctcttcggatactttaccgacgtcgccctctactttgtggcattcataccctttgactcctcactatggatgtctgtcctcttcttgctcataagtatctttctgactgcattcgggatattcatctacatgccggctaacatcgcaccactccccggggaaggctgtgtcgaggccattgccattgtgaccggatggcggttcagcactatcaaaatcggttttgatgctagcatggtggtgatgagccttatcatgtgcggcttatggtatacagatatgttcggcgccgtttacatcggcacaattatcagtgccatcatggtcgggtttactctaagacagattaacaatatctatgctcacatcaccggagctcagattaacgtagtaaataaatga

SEQ ID NO: 10133 - DNA, 720 bp, synthetic construct
  source 1..720: mol_type = other DNA
atggagtttggactctgggaaaaatactataaggacataatcgaggacttcggctttagcaggagtggcgacgagaaatccgccaaactgctcgacgaaattttatccacagagggctgcctgaccctggacgacctgagtcagatcgtgggtttcagcgataagttcatcgtctttggagcaggtccgtctctaaaaaatcacgtgctgatgctcaaggaaaaccacgatctgaaggattacgtgttggtggccgcggacggcgcaaccaccgctctgattgaggagaagatctcacccgacattgtgtgtacggacttggatggaaatgttgatgacatacttctcgccaatctcagaggggccaacatggtcatccatgctcacggagataacattgataaagtcgctacactgtccagcctcttcagcaacgtcctgggcactacacaagcacagcctatcgggaacctgtacaacttcgggggctttactgatggggaccgcgcactcttcctgtcagtagccctgggggcctctgaaattatacttgcgggaatggacttcggcgataaggtaaccaagtactcgcgacccgacctggaagtgaaagttgagggtgctgacgagtttaagcggaaaaagctattgtatgccgagaagttcacgaattggatcaccgaaaacgagccagtgaatgtgatcaacttacttgaatga

SEQ ID NO: 10134 - DNA, 1110 bp, synthetic construct
  source 1..1110: mol_type = other DNA
atgggaatcgaagacattctgatgcacgatgaaagtctgtttcagaacatcaatgccttcgatccagactacgtccctcaagactacaatttccgcgatacccagatggaagccatggcaatatccatcaggcctgcaatgattggcgggcagccgtcaaatgcgatcgttctggggtcgcctgcaaccgggaaaacaacagcgatccgcaaggtctttgaattggtcgagaagagcaccgagaaggtggtttgtgtgtatattaactgccagctccacaccactcggtttggaatcttctcacagatttataaaaagatattcggccacattcccccagagaccggcgtgccattcagcagaatttacgaccagatcatgcagaacctccagaagaataacaagtccttggtgatcgccctggacgacgtcaactatttattccagtccaaaacagctaataaagtgttctacgacatgctgagggcctatgaagagtaccccggcgtgaaaacagccatcttcgccatcttgtcggatctggagtttaagtacgccttcgataagaatgtcaacagcgtgtttatcccgcaggagatcaatttccccctatacacttacagcgaaatcgaggatatactgaagaacagggctaaggccggattctttccaaacgtactgcccgaggacatactggagcaaatcgcaatgtacacgtatgaaaatggagatctccggattgggattaaccttttaaaaagctgcggtaacttcgcagaggccagtgcgagccgggaagtgacccaagagcatttcgagcaggctattgactccctggtgagcatcaacattcgtgagactctcaactcactcaacgatatggaaaaggatcttctaaaagtaattagtggctgggaaggtgtgtgcaaggccggcgaactcgctgagatgtatcgagagaagaccaattccagctatgcttctttcaaccgcacactcgacaaactggagtttgtgagactgatcgacacgaagtttacgggaaaaggggttagaggcaattctcgagagatcatactgcggtttaaccccgacgagtaccttatctga

SEQ ID NO: 10135 - DNA, 180 bp, synthetic construct
  source 1..180: mol_type = other DNA
atgttcgaaaataatgacaccacaattcaggtagatctgcggaagaaaaactccctcaaagaggagatcatgtataagaacatcgacgtgcagagctgcatggtcatgctagttgtgatagctgccctgctcctgagtgtgattagcgtggtcgcagcccaaaacccctacatcatctga

SEQ ID NO: 10136 - DNA, 414 bp, synthetic construct
  source 1..414: mol_type = other DNA
atgaagaagttcgagtactttgaagtcactgcggacatcggcttcaaggcttatggcaagaacctgaacgaggctttcgagaacgccggtctcgccattttcaacattatcagcgacacgaattatataaatccaacaaaggaaatcagctttgagatcacctccgaggacaatgtgtcgatgctgtacgactacttggaagagctgctcttctaccacgaggtggaatttatgctgtttagcgaatttagtgttgagatctccgagggattctcacttaaagcaacaattatgggggaagagatcgattgggataagcacgagcggaaatctgaaattaaagcaataaccttccataagatggaagtgctagagaccaaccccgtaaaactccaggccatcgtcgatctgtga

SEQ ID NO: 10137 - DNA, 321 bp, synthetic construct
  source 1..321: mol_type = other DNA
atgaagaggaccagaatcgtatcgcgcaacttcgagatggtgctggggattatcggctcaataatcgggtccttcagcggaagcatcctactgttccttggcaccttctataacgtccccacgccatttttgggctttgtggctataatcgcgtcctttctgggactcgccagtagtgtttacgtcaaaaaggacactgagattgctggggtgggcttcataatcgccacaatgttcgtgattgtcggatctgaatacattaatatcatcagcgccattttcctcctggtggcaggtgtgtccgcactgtttcggaaatga

SEQ ID NO: 10138 - DNA, 1449 bp, synthetic construct
  source 1..1449: mol_type = other DNA
atgagtataaaggatgaaattaagaaaattaaggacaatgtttacgagatccccgggtctttcaacaagaagatgcgagcttctggaaggttctacatagccgatgaatatttcgacgagctggaggagggagctgtggaacagatagtcaacgtcgcctgcctaccgggtgtgcaaagatattccattgggctccccgacatccattttggttatggctttccaatcggtggtgtggcagccttctccctccggaatggaatcgtaagccctggaggcgttggctttgatatcaactgtggcgtccggctcatcaagtccaatctgacgatagacgatattgacggcaagttggacgagctgacagagaaactgtttaagaacattcctagcggggtgggaagtaagggtaagatacgcttggaggagaacgaaatcaacgatgtcctagactatggggctgaatgggctgttaataacgggtatggctggccagaggacttggaagttctggaggagaacggacggatggtggacgccgactccagtatcgtatcggaaaaggccaaaaagagaggcatcccacagctcgggtctctggggtcaggcaaccacttcctggaagtgcaaattgtggacgagatttacaatgaagaggtggctaaggtattcggactggagaagggcatgattgtggtcatgatccacagcgggtctagaggctgcggtcaccaggtatgttcggactaccttcgcgtgatggataaagcctataagaaatacaaagtgaacatcgatgaccgacagctggcctgcgctccacttgattcaaaggaggcccaggagtatatccaggccatggcagcggccgccaactacgcatgggctaacaggcagatgatgacccattgggtgcgggaaaccttcgaggaggtcctgggcaaaagcgcaaaagagatggagatggatatcgtctacgatgtcgcccataatatcgcaaagatggagactcacaagatctacaaccgggaggaagaagtgttagtgcacagaaagggcgcaactcgcgcattcggccctggctgtgaggaagtgcctgaaaaatacagggcggtcggtcagccggtgctgattcccggaacaatggggacagcgtcctacatccttcacggaactgacgttgctatggaggagacctttgggtccaccgcgcatggcgccggacgcatactgagccgtagcaaagctaaaaaggactacaatgcggatgaaatcaccgaagatctcgagtcaaaggggattaaaattaaagccacgagcaaaaatgtgatcgcagaagaagcccccggcgcctacaaggacgtggacagtgtcgtgagggtgtcagacgagacaggcatcgctaagttagtcgccaaagtgaagcccctcagcgtttgcaaaggatga

SEQ ID NO: 10139 - DNA, 759 bp, synthetic construct
  source 1..759: mol_type = other DNA
atgatcggaatcattgggggcagtggagtatacgagatcactcagaaggcagacagctgcagcaaaaaagtagtcaagaccgattacggtgaggtgaccgtgtccatcctagaaatcttttccaagaaaatcgccttcattccccgacacgctcaggggcacagcataccaccacataagatcaactatagggccaacatcgacgcacttagaaatgtgggggtgacgcagataatagctaccaactccgtgggatcgatgaatatcgacatggctccgggttcattcgttgtgcctaacgattttctggatttcacacaaaaccgcattaagacattctacgaggataaggtggtccatgtggacgtgaccgagccctactgccccaatctcagagacatcctcgaccggtctggagacgtaatcctgggtggcacctatgtgtgcaccgaggggcctcgctttgaaactcctgccgagattaaaatgttcaagatgctcggcggggatctggttggaatgactggcgttccagaagtcacactggcccgggagaggggcatttgttataattcaatctgcattgtctctaattacgcggcgggcatcagctccaacacattaacgattgatgaggtcttcgacattgtcagtgagaaagaacacgacttgctggaactgatctacaactttataaagaatgccgaagacagccccaactgtgagtgtcaccacgcacttaacggcgccgaagtgtga

SEQ ID NO: 10140 - DNA, 324 bp, synthetic construct
  source 1..324: mol_type = other DNA
atgagactggccgtagtgagttccgacggggagaatgtcgatttgcacctcggcaagggaaagagcgtgtatatatacgaatacgtggagaacaaacttaactttatcgagcggagggacattgagataagcgacgattcaaagcaccagggcggaaaagtcatcaaaacctgcgaagactgtgacgtgctgatctctctgcagtacgggttcaagtccaagatcaaagcagacgatgtggatctaaagctggttatcgacgaaggccccattgatgaggtcctccaacgctatattgaccattacaacttcatgcacaagtga

SEQ ID NO: 10141 - DNA, 558 bp, synthetic construct
  source 1..558: mol_type = other DNA
atgagtaaatatatcatcgtgaccggaagcccacgcgtgggagccaattccgacgcgatcgctgaatttatcaaagagagcctgggaactaacgacgtcgaaatttggaatatatatgaaaaggattacacatactgtcatgcagacaatgcttgcaaggagcttgggcactgctcaatcgatgacgatgccacagatttggtggccgatctgaaggaggctgatggtgcattcctgatctcccccatctacttcggaaggctcccggggcccgtctacactattattgaccggttctatggcgtctttaacccagcgaagggcctggacgtgccttctccagataagaaaataggtttcgttctcacgatgggcggggacgaggaggccgtgaagaacgccgagcccgtagccgctcaggccggcttcgcattttcggtggtggggtttggcgcttccgacagcgtaattctggggggcaacaacgaccctaccgcattcgccaacagtgacgaggaacaggccaaggttaaaaccctagtcgactggatgctctga

SEQ ID NO: 10142 - DNA, 582 bp, synthetic construct
  source 1..582: mol_type = other DNA
atggcaaaggccaaggcccggcgtcgagtccgggatacatggaaagagaagtcctggtataccatcaaaacccctgtgaactttgaggacaaggaaataggggagactcccgctaaagacccggagcttctgataggacggggggttgaggtgacaatgagagaattgacaggcgacttctcaaaacagtacatcaagctcaggtttgagattgacaatgtggccggggaagtggcaaacacaaaattcaccggacataaaaccactaccgattacgtacgaagcatgattcggagaggcacgagccgcattgacgcgagcactatcgccaccacgaaagatggtcgcaagatcaagctacaagtgctggctgtcacggtcaggagagccaagagctcccagcagaaatacatgaggaaggtcattgaagatctgctcaacgaggccgcggctgagaagagtttcgacgaactgataaaagtggtggttaacggcaagctcgcatcggaaatctaccacaatgccaagaagatctatccactgaaacgcgtggagattatcaagagtaaggtaatcaagtga

SEQ ID NO: 10143 - DNA, 210 bp, synthetic construct
  source 1..210: mol_type = other DNA
atgaagaagatcttccagaatctgatcctccagccgcggtatgagacgaaaacaacaaacaccatcaatattgcaaacattggcctggccgctagcttcaagctctttactgtgaccagcttccccctaaatctgaacccaatcgaccacaaggcgaaacaagccaaaataaacaactaccaggtggccgataataacatgtttgtctga

SEQ ID NO: 10144 - DNA, 696 bp, synthetic construct
  source 1..696: mol_type = other DNA
atgtacgggataatgattaactggctttatgtaatcctactttttattctgggattcatcacgtataggcgccagtccctcgatctgttcggctctgcagtcatgatcattatgggcatcgtgatcatattcagcgcgggaaccaactggctgttgctgatcgtgctgttcctcgttttgagcctgattgccactaaattctcgaagaagtacaagctatccctgggcgaatttgagggtcggagaacatccaagaatgtgattagtaatggggttgtagcctgctttatggctgcctttggagggtattacagcccttttgtcggaggtttcattggcgccatcgcaacagcaaccgcagacacactcgcttccgagatcggggtgttggacccccacccgcgactgataaccaccctgcagaaagtcgatcccggcacgaatggggctgtgagcgtgctcggaactgtctcaggaatcgtgggcagtgcgatcattggtatcgcggcctacttcctgggaataatgccaaatccattcctggccatcttagtctcaatcatatctggcactatcggctgttttggggacagcatcctcggcgctctcttcgagaacaacgggtggctgaccaacgaacatgtgaacctgctggccacaatcttcggtgcccttgtgggcattttactcatttga

SEQ ID NO: 10145 - DNA, 1239 bp, synthetic construct
  source 1..1239: mol_type = other DNA
atgaagggcctcattctaatcatggacggtatgggcgaccgtcctattaaggagctgggaaacaagacacctttggaggcggctaatacgccaaatatggataaaatggccgaggaaggaattactggtatcatggacagcatagctccagggattatccctggaagtgataccgcccacctctccatcctggggtataacccctacgaggtatacaccggacgcggcccgtttgaggccaacggggttggagtggacgttctgccaggggatatcgcattcagatgcaatttctcaacggcagatgagaatctcatagtaactgataggcgggcaggccgaatcaaggaaggtaccgaggagatagtggaagaactgaacaagatggtgttggaagactaccctgagatcaagataatcttcaaagaatcgacaggtcaccgagcggtgcttgtgctccgcggggaggggctgtccggcaaagtcagcgacgcggaccccaaggtggagggcaacaaacccaaggaagtgaaggctttggatgatacccaggaagctaaaaaaaccgcagacattctaaacaaacttgtgtttaagacttacgagatggtgaaggaccacccagttaacctgaaacggattgaggaaggaaaaccgccggccaacattgtcatcccccggggggccggcgaggtgcccgttgtcgacagcctcaacgacaaatatgaggtcaacagtgcctgtattgcagaaacaggcctgatcatgggaattggcagatttgccggaatggacatcatcgaaatggaggatgtaaccggtggaatagacactaacctggagaatattcgggatacaatcatagaccaggtgaagaactccgaacacgacttcttccttgtgaacatcgatggggctgacgaggccgggcacgatggtcaaacgaaggagaagaaggagttcatcgaaaaggtcgactgcgtaattatgggcgagctgatgaaactggacaatgtttacatctatctgacagccgatcattctaccccaatctcagtcatgaatcatagcggcgatcccgtgcccgtgctgattcgcggccctgaagtcagggtggacgatgtgaaggagttttctgagagagcctgcgcaaaaggaggcctcaataggatcaggggcagcgacgtcatgaacatcatgatggacttaatgaattacgctcataagttcggggcctga

SEQ ID NO: 10146 - DNA, 1338 bp, synthetic construct
  source 1..1338: mol_type = other DNA
atggtcgccaaaaaactattcggaacctcaggcatccgaggaaggatcggcagcgaagttacctgcgaactggcactgaatgtcggtaagtccctcgcttactacctggggaactctggaacagtagtgctcggctacgacacaagaacaactaaccagatgttggatcaggcaatttgcgccggcttgctggagagtggggtggatgtcataaagatagggatggtgccaactcccctggtcggctacgccactgagaagcttgatgcggatgcaggcatcatgctcaccgcctcccataacccgagccagtacaacggaatcaagctgtggaataagaacggaatggcctacacctccaaacaggagaccgagatcgaaaagatttatgcaaacaatgactatattagcgtgaactgggataaaatcggcaagctgagtgtcaacgaggaaatcaaggggcagtatgttgacgaccttgtgaacctggtggacatcaaggaggggcttaaggtggtgatcgactgcgcgtctggggcaggtagtgaaataagccctctcgtgttccgcaaggccggatgtgaggtgaccaccctgaacagccaagtggacggattcttccccggtaggaatcctgaacctaacgaggagaacctccaaacactcatgaaaacggttgtggccatcggagctgatctggggatcgctcacgacggggacgccgaccgcatgattacggttgacgagaatggcaatgtgtccccctttgattctctgctagccctaatcagcaaagaatttgatggagatattgtcaccacagttgatgcgggcctgtgtatggatgagtccgtcaagggcaaagtgatacgcacgcccgtcggtgacgtaaatgtggctgaggcaataattgaaaaagatgccagttttggtggcgaaccctctggcacttggttgcacccagacttctgcatgtgtccggacggcatcctttccgggttacggatcgcgtcaattgtgtcacgagacgggaagctgagcgacctcttggattcgataccatcctatccaaacatccgtgagaagatcgtctgctcaaaagaggctaaaatcaaagtcatggagaacatggagaatctgctgatcaacgccttcgacgatgttgccgatgtaaatcccctcgacggcgtgaggctcacatttgaagacgacagctgggtactgattcggccttcgggtaccgaagactacattagaattactttagagagtcgggacgctaagagagctgaggagatcaaggaggtgtgtgtgaagattattaacgaaaatctgtga

SEQ ID NO: 10147 - DNA, 174 bp, synthetic construct
  source 1..174: mol_type = other DNA
atgacaatatacgtctgcctgcactgcgagtatcggtttgatagcgagaagggcgaccctgcctacaacattccagccggagcaaccccggcagacatgcccgacgattgggtgtgccccgaatgtgctgcgctcgggatcgaagctttcatcgccgaagaagaggaggagtga

SEQ ID NO: 10148 - DNA, 1308 bp, synthetic construct
  source 1..1308: mol_type = other DNA
gtgaaggcaatcattctgtgcgctggtgaggggtctcgcatgcgacccctcacactcaccaagcctaaaaccatgctgcctgttgccgggaaacccatcatgcagtacaacatagaatccctgagagagaatggtattgaagacatccttctgatcgtgcggtataaggaggagatggtgcgcaactactttggcgatgggagcgaatttggagtgaatatcatttaccagcgacagaaagatttcttgggaaccgctgacgccatctcttatggaaaaaacttcatcgatgatagcctgatagttcttaacggagacatcattttggacgacgagatcattagtgacttcatcaataaatacgacgagctaaagcccgatacgctcatgctcttaacagaggtcgagaacccgagcgccttcggggtcgttgaaatcgaagacggctacattaagaacatcgttgagaagcctaaaagagaggaagcgccaagcaacctggtgaatgccggaatctatatcttcaataaagatatatttgacaaaatcgacaagaccgaaatttcccagaggggggagtacgaaattactgattccctgacgatgcagatcgaggatggcctgaaggtcatggggcataaaactgacaaggactggattgacgtagggcggccgtgggaattgattgaggtgaatgaggagctcattggcaacctgaagacggaaatccgcggcaaggtggaggatggagcccatattcacggggaggtctttctggatgaaggcagtgtgataagggccggcgtgtacatcgtaggcaacgtgtacatcggcaaaaactgcgacataggccccaactcctatattcggggtaatagctacttcggagataatgtgcacgttggaaacgcggtggagatcaaaaactcaatcatcatggaaaacaccaacgtgagtcacctcagctatgtgggagattctgtcattggctctaactgtaatattgcagcaggaactaacatcgctaaccttcggtttgacaacaagtcagtgaagacaaagatcaaagaccaaatgatcgacagtggcagacgtaagttcggcagcatcataggggattcggtcaaaacagggattaactcatccttcagcccaggtgtaaaggtgggccacaattccaccatcggttcgggtgtcctactgtacaatgacgtcccatcagacaccagggtgctggtcaagcagaattatatcattcaggataaaaatataaagaacgacattcaagacaagaatataaagaagtga

SEQ ID NO: 10149 - DNA, 483 bp, synthetic construct
  source 1..483: mol_type = other DNA
atggagaacatcgaagactccattgtcatctgcccgggcgctcaagtattcggggatgttgaactcggggagaatgtctcgatatggcatggcgccgtgatacggggagatacggactcaatcaccattggaaataatagcaatgtgcaggataactgcgtgattcactgtacaaaaggcttccccgtggagatcggggacaacgtcagcgtgggccacggcgcagtggtccatggttgcaagctggatgacaacgtgctgatcggcatgaacgccaccgtgctggacggtgcacacatcagcaaaaactctattgttggagccggggccgtcgtatccgaggggaaggagtttcctgagaacagtctgattctcggaatccccgctaaagcggttaagcagctaagtccagaacaggtggagttgatccagaacaatgccgacaactatgtgaagctttccaagcagtacatggaagactga

SEQ ID NO: 10150 - DNA, 1101 bp, synthetic construct
  source 1..1101: mol_type = other DNA
atgaaagcaaggaaaatcgtcgatgagatggattcctatgtgccgggcaaaagccaggatgagattgctcaagactttaacctcaaaaaggaagatatcatcaagctgggttctaacgagaacccatgggggcccagcccgaaagctatggacgcaattaaacaggagatcaacactataaatcgctatcccgagtcccagctgggggagttggcatcggaaattgcccgatactccggcgtggacgattcgcaggtgattatcggtggcgatggcgcggatgagataatcgacgttctggccaagacattcatagacgccggagacgagtttatcgtccccctgccctcctacatgtattacgagtacttgttgaagcaatatggagccagtccaatctacgccagatgggacatcgagaagaacgaactggatgtggacagcatttacaacgctatcaccgacaaaaccaagatgattttcctctgcagtcctaataatcctaatggcgctctgatcgaccaggaggtctttatcgacatcgctagcaagaaccccaatatactgattgtgattgacgaagcctacttcgagtattcagaggtgacgaataaggatctgatcaatgaatttaacaacgtgttcattatccggaccttctccaaggtgctggggctggccggaatgcggatcgggtacggcctggcatgttccgaaattatcgagtacatgcacagaatcaagcctgtattctctatcacacgtttaagtttcatcgcggcccttaacactctcaaggacactgaatatattgaaaatagcatcaagaaggggatcgagagccgccagtacctctatgacgagatttcaaagatagacggtctttttgtctttccatctaaaagcaacttcatgctaatcaacatcaaggaaaccggctttacagcctcagaattagcgctggaactcatgaaacagggcataattgtaagggactgcacgagcttcaaaggactggatgagtactggattcggataagtatttgcacccttgatgaggataagaagttcattgaaatcctaaaagaggttctcggatga

SEQ ID NO: 10151 - DNA, 705 bp, synthetic construct
  source 1..705: mol_type = other DNA
atgtacataggtggtaccgtgattagctccgtggaatttcatggcaacatgtcgctcgtcatcttcatgagcaaatgccctttggcttgcaggtattgtcataatgtggagctgcttgaggacaacacggaatggcctttcgacaaggtaaaacaagaaattgattacagtgccgattttctagatgccgttgtcatctctgggggagagcccctggtacaagtcgacgcagtgatcgagatccttacttacgtgcgacagattggactgaagacaaaactggacaccagcggcatatacccagacaacctgaagaagatcttggatttaaacctgcttgattatgtctccctggatgttaagaccaccttctccaaatataaaaagatcacgggagcaaatgtggggtttcaggtgcgcaaatcaatgaacctcataaacgacgcgggcgtgcacctggaggtacggacaacttacgtccccaccctccacacaaaaaaagacattattaacctcgtggacgacatcaaggccgatatctacactatccagcagttcagaaacaagaatgtgctggaccccgctctcgagaaggtggacgtcccaaatccgcacgatctagtcatgctggcccaggaaattaagccatatttcaatgggatcgttaaggtgaagagtggcgaatttggcgagcaggtgatctga

SEQ ID NO: 10152 - DNA, 1137 bp, synthetic construct
  source 1..1137: mol_type = other DNA
atgcccatcctcagcttttccagcaatgacatcgacgtgattacaggtaaaaagacccggaccatccgaaaggcttggaaaacgccactgaaagtcggagacaggctgtactgctattggaaccttgtcagcaaggaaaagatgaagattttcgaggcgtttgttacaaagatcgaggacatctccttcgatgaactgaaaggaaatgacgaactcgcccggcaggaaggctttaaggactcaaaagacatgctgaaggaatttaagaagatgtacgggggaagaattgatccttctgacaagttccaaataatctacttcgaaaaaattcacattgacgattggaagggcgacaaaattgatgagaaggcaatgatttctaaaagggcagatatcctattcgatagtgggaaattcgacaagtccaccatgtgttacgacgccgctctgaaactcgacccccatgatgtgtatttgctgaacaaacagggagataacttaagcaggctaggtcgcttcatggacgccattgagtgctacgataaggcactcatgatcgagcctgataacgtatatatcttgaacaacaaggccatcgcactcctaaactcgggcaatatcaatgaagctctgaaggtcagtaacatcgcctacaattatcgcccatccagtccgatagtgctttattggcgagggtttattttggagatgctgggcagatacgacaacgctttaaaagtgtacgataagctgatagtgatagatggggacaatccagaggtatggaactcacgggggaacctgttgactgacatgggcatgctggaggaagccatcgagtccttcgataaggccgtggaggtctgcctggacgattctgaaatggacgcttcagccataaaccgcatgggtaacgcgtacatcgatctgggaaaacttgatgaggccctcgactgctttaataaggcgatcagcctggagaagaataacattgattttctgcttaataaaggcgtggtgctgatggaacttggcaagtttaaagaggccatcgacagcttcaacaaggttctgctcagaaaccccgacaatgaggacgcattcttcctcaaggaggaatgtctcgagtatctgtga

SEQ ID NO: 10153 - DNA, 1365 bp, synthetic construct
  source 1..1365: mol_type = other DNA
atgtccaacaagaagcggctgttcggcacattcggagtgagaagaactgcaaatgatgtgctcactcccgaatttgccacacggctgtctgcatgctatggcagtgtggtgaaaggcaagatcgcggtgggggcagacaccagaacaactagcccgatgctgaaagatgcagtgattgctggcttgctgtcagccggttgcgatgcggtggatctaggaaccttgcccacccccgcagtgcagtatgctgtacgacagtactacgatgggggaatcatgataaccgccagccacaatccgcctgagtttaatgggctcaagttcctcgatgaatttggtattggtctgcctgacgatatcgagttggagattgaaagcctgtacttcgactcggaaccaatccgcgccaattgggacgagattggggagaaatacacaaacgacaacatcattgacgagtacattcagaccgccatgtcccatgttgacgtcgacgccattaaggaggctaatctcaaggtcgtactggactgtggaagcggggccgggtcgtttaccgctccctatttagttcgggaacttggctgcgaagtgacgacgctcaactgccaagctgatgggtttttcccaggcagggaccctgagccaatcgaggagaacctccaggagctcatcagcgtggtgaaagagttgaacgcggatatcgggcttgctcacgatggtgacgccgaccgaaccatctgtattgatgaaaacggagcctttgtcctgggcgacaaaaccttcacactggtcgagaagcagatgctgaaagaaaacggtggcggcactattgtcacaaccgtggcaacttcacaggctatttacgacatagccgaggaatacaatggagaggtcatagcaactgccgtcggagatctgctggtagcccgtaaactcaaggacacggatggcctgttcggaggcgaggaaaacgggggcctaattttccccaacttcgtttatggcagggacgccgcgttaactgttgctaaaatcctagagataatcgcgaaggagaacaaaacactttcccaactggtgtcagaactgcccgtgtactattctgctaagatgaagacggagtgttctgacgacctgaaggaggaaatcatgtccaagatagccgcagaggttaaggaaaccaccgactacgaactggacacgaccgatggcgtgaaaatctttaaagacggtggctgggtcatcatccgcccatccggaacagagcctatcttcaggagttatagcgaagggaatagtcaggagcaagccgacgagatggcccagtggggaatcagccttatcaagaagtaccgcgattga

SEQ ID NO: 10154 - DNA, 399 bp, synthetic construct
  source 1..399: mol_type = other DNA
atgagaattacggatgaaaaactgcttaggatctccctgatcactgccctcattgggatcatcggactgatcatcttcacaccctcaatcgaagtcaaaaagatcgacattaaggatattacccggtccatgattgacgagaaggtatccgtgcggggcataatcacagacatcaaggagagcagtagcaaaaccaactattttttgactataagcgacggggaaagtcgaatcaccctgattatattcgaaaagcaggtttcagagattacgtctaggaacctagatatcggcgacttcaagaataaaaaggtggaggtggtcggaaccatcacagagtacaaatctgatctcgagttaattctctcgagcggcgacagcctgcgcataatcaactga

SEQ ID NO: 10155 - DNA, 1659 bp, synthetic construct
  source 1..1659: mol_type = other DNA
atgaagtaccaggagttggtagacgtgtactcagccctcgaggccactaccaagcgactcgagaaaaccgaaataatctcggaatttctcaagaaattagacaccggcaccattgagaaggtcggcctgctgatccttggggtggtcttcccagcatggtccagcgaagagatcggaattggcggtaagcttgttgaaagggccgtagcagaagccgtcggcaccacccaggctacggtcgaggacgcggtgcgtgacgaaggcgacattggtctggcatgtattaaactctacgccaaaaagtcccagatgacttttttcagccagccactaacaatcgatttcgtcttcaacagcctccgcaagctcagccagatcagcggaagccgcagcactaatcgcaaaatcgcggtgatcctggaactgctcagccaagccagtgccacagaggctaaatacttaacccggaccattacagaggagctgagaatcggcgtcggggacggcgtcgtgagggacgccatagcccaggccttcgacatcgacaagaaggtggtggagagagcccaaatgctgacaaatgacttttccgtggtggccaagacagcgaaggaggagggcagttccgggctcgagaagctgaatctcactcccggaactcccgttaaaccaatgcttgcccagctggccccacccctggaggaaatcatccccgaaatgggggtggctatctgcgataccaagtatgacggaatccgattgcaggtgcacaggaacaacgatgaaatcaacatattcacccggcggcttgagaatattactcacgctctgccggaaatcgttagactgtttgatgagcacttgccccatgagaactacatcgtagaaggggaggtcatagctacacgcgatggaaaaccattgcctttccaaaacatactgcatcgtgttcgcaggaagcacaatgtggaggaagctatagagaacgtgccgctaaaagtctatctgtttgacgtcatgtattaccaggttcctatgattgatgaacctctgaaaaacagaaggaccattctggagtcgattgtggatacttcagtggacgagatgaatcttagtaccatgaagattggaacagctgaaaacatcaaggagattcaggaactattcgagacctcaatcaaagaagggcacgagggaattatgattaaagatgcaagcgagccttatattccaggccttaggggcaagaagatgctgaagtacaaggcagaacccgagaccctcgacatgattgttataggtggcacctacggaatcgggaagcgcggcgatttcgtgggtagctacttggtagctctccgagacgagaacaatgagtttaagagtgtggcgtatgctgcaacaggtctggatgacgcaacactggagtacttgactggcaaaatgaaggaactggagctgtccacgaaagggcgggagatcaaggtggaacctaaaatcgtcttagaaatcgcctttagcgagatcgttgagtcacccgagtatgaaacggggtattctctgcggttccccgtggtgaagaacatccggaaagataagggtccgatggacgtggatacggtggaaagactgatctccatgtacaacacgggaaattga

SEQ ID NO: 10156 - DNA, 1275 bp, synthetic construct
  source 1..1275: mol_type = other DNA
ttgactcagaaaagtgaagcacagaagggtaatattaccccggagatggagattgtcgcaaaacaagaaaacatggacatcaataagctggtcaagctggtggacctcggaaagatcgtaattcccaaaaatatcaacgggcactcaaagccttgcgggattggagaaggcctgaagaccaagatcaacgcaaatattggtagcagctctaaaatcgacgatatcgagctcgagatcaacaaggccaagctggctcaggaatatggggccgacgctctcatggacctgagcaccggttctgatctgaagctattccgcaagaagatcatggatgccgtggacatctgtatcggcacggttccaatctatgaggccggggtggttaccctcggcaaaaacaaggagataatcgacatggaccctgacgacatatttaaggccatagaaaaccaggcgaaggaaggagtggatttcatgacgctccactgtggaatcacagaggacctagtgcagaaattgaaagactcgaacaggatgatgggaattgtgagtcgcggcggcacgtttatggccagctggatcaaccataacaatatggagaatcccttgtacgagaactatgattacctgttggagctcagctacgagtatgacatcacactgagcctgggcgatgggctgcgaccagggtgtctggctgacgccagtgacatccctcagattcaggagctggtaaacctgggtggccttgtgaagagagctcaagatgcaaatgtgcaggtcatggttgaggggccaggacacatgcccctgaatcagattaaggcaaacatggaactccagaaaaccatttgccatggggcccccttctacgtgctgggccccctcgtcactgaccttgctccgggctacgatcacattacaggcgcgataggcggcgccatcgccgcgtcatccggggcgaacttcttatgctacgtaacaccagcagagcacctatcccttcccagcctcgaggatgtcaaagaaggagtcatcgcgtccaagattgccgcagaagccgctgatgtggcaaaaggtctggaatcctcatggactcaggagcgggccatggctcaagctcggaaagagtttgactgggagaaacagttcaatctggccttagataaatccaaacctagaacctatagggagaagtgcgagcttgacgacgatgaaatgtgcgccatgtgcggagaatactgtgccgtgaagatagctaagggcgatttttga

SEQ ID NO: 10157 - DNA, 669 bp, synthetic construct
  source 1..669: mol_type = other DNA
gtgtttactataaaggtgatattctttgataccgaaactaccgggcttgactgctccaggtgcaagattatcgagcttgccatgctgaccgtggagaacggaatcgtcatcgacaagtatgatgaatttatcgatgtcgaggagccaatcccacctaaaatatcggcactgacgggcattacagacgacatgattaagaatgagggcgtgagcgaagaaaaggtcgccaacgacctgaaggagcggctaaccgacgacacattaatgatcgcccataactgtcaattcgacttgcagttcatttactacctcctcaagcgtcactttcccaacgaggcggacaagatcgtgagcaatctgaattggctggacacggtatccgtgctgaaagataggaaaaaattcccccacaaactgatcgacgctgtgaagcattataatattccggaagttaacttccaccgcgctattgatgatacaaaggccctctacaaggttaccttggccatgaaaagtgaacgagatgatctccgggactatatcaatatttttggctataaccccaaatacggggtaagcggaagacgcttcgatttcatcgagtacaagtcacagttctaccaccagcggatcgtcgcacaggagtttactctgcctaacaggagatga

SEQ ID NO: 10158 - DNA, 834 bp, synthetic construct
  source 1..834: mol_type = other DNA
atgagcgagcatatcattgaggcactcggactgagcaaggtaatcattaaagatggcaaagtgatcgacgtcagtgaaccccaggtggaatactgccctctgttcgaccatcacaggggcattaagaagctgacaagcgagataatcgccaagaacataaagttcaggatagatgattttggcatgtgcatgccaaatcgccagctccgaatgaaggacttcctgaactttggcattagcgagatcatgtgcacgctgcttgacgaaaaaataattgacagcgtggtaatggtgctggaggggtgcggcactctgatcgtcacagagtcagagctcgtgcagggtatcggtggaagagtgtctggccttgtcaagacctcccccattcctgaactaatcgataagatcggcaaggagaatattgtgcagccagagaccgctgagatcaaccagattaagggactcgagctagccatcaagaaagggtttaaaaatattgccgtgacgataaccctggcttcagatatcgacgagatcgaacgtatcaagtcggaaaaccccaatgtgtccatctacgtctttgtcgttcacactactaagagaaacgccaaggatgcgcggaaattattcgacggatgtgacgttatcaccagctgtgcatccaagtatgtgcgggaaatcggaaaaaaggagagtatcaagacagttgggcaatccattcccattttcgcccacaccgaagatggtaaacgcttcctcgagatgcggttgaagaaaatcgggggggaaaaacctaaaatagacaacccggacttgccatacccgctgatttga

SEQ ID NO: 10159 - DNA, 2202 bp, synthetic construct
  source 1..2202: mol_type = other DNA
atggcagaaaacgagattacgctaaaagttgctgaggccatcagccagaaagacgtcggccagggcgtggctcgactggaccctaacgtgatggatgacctgaatattcatgagcgggacctcatcgaaatcataggagaaaaacgcactgccgcaatcgcccttccctcccagaccgacatcggacttgaggtgataagaatcgacggactggtgcggaaaaattctggcgcaacgatcggcggggaggtgcagattaggaagattaaggctgtggaagccaaaaaggtggttctggcccccatcgaaaacaacatccgggtgcagggcgatgttcggggcctgtttgccggcaaggtaatggtgcagggagacattattggctctcagattcgcgccccaaagcccagtatgaatatggggttcggtagcttatttgacgagctcatggatttcacaccagctatgaaagaaatcaagttcgctgttgtctccacgaaccccaaggatatcgtgattgtgggtcccaataccgaagtgcagttgtacgagaccccagtggacgtgtcgaaaatagagggggtaggaaaccttgtggatgtcagctatgaagacatcggcgggctgaaggaagaggttaaaaaggtgagagagatgattgagatccctctaaagagacccgagctctttgagaaactggggattgcccctccaaaaggcgtcttgatgcatgggccaccaggcaccggtaagacactgctcgcgaaagctgtcgcgagtgaatccgatgctcacttcattgcaataaatgggccggagattatgagcaagtacgtaggtggatctgaagagaacctgagggagtacttcgaagaagcggaggagaatgccccttcaatcatattcatcgatgagctggacgccattgctcccaagagagaggagaccaacggtgaagtagaacggaggaccgtggcgcaattgcttacgttgatggatgggcttaaatcccggggccaagtcgtcgtcatcggggccaccaacaggcccgattctctggacccggcactgagaaggcccggacgatttgaccgggaaatcgaaatcggcgtcccggactctgaggaacgcaaggaggtgctggagatccacacacgcaacatgccgctcagtgaggatgtcgacctcgacaagattagcaatacaacccatggctttgtcggggccgacctggaatccctctgtaaggaagcagctatgcgagttgttcgcaggatcttaccggagatccaaaacgatgaggaaatcccaaaggaggtgatggagaagatcgtggttaccggcgacgactttaagaatgcgcaaaaggaaatccagcctagcgccctgcgggaagtcctcgtgcagatcccagatattaagtgggatgatatagggggtctggaagacgtaaaacaggaactcaaagaagcggtggaatggcccctcaagcaccctgaaaccttcaaacgtctgggaatacgtcccccaaagggaacattgctctatggcatccctggcactggtaaaactttactggccaaggccgtcgcaagtgagagtgaggctaacttcatttcagtgaagggtcctgaactgctgtccaagtgggtgggagagtcagagaagggggtgagagaggtgttccgcaaggccaaacaggcagctcccacagtgatttttttcgacgaaattgatgcaatagccagcacacgtagcggcaatgacactgactcgggggtgactaagagagtggtaaaccagctgctcacagagatggacgggctggaggagcttgaggatgtgtcaattatcgctgcaaccaaccggcccgacatcctggatgctggcctcatgcgccctggacgattcgataggcacatacaagtcgacgagcccgatgaagagaccagactggccatctttaaagtacacacgaaaaacatgcctctggcggaggacgttgacctaaagaagcttgccaagaatactgagaagtatgttggagccgacattgagtccgtgtgccgcgaggccgcaatgttgactctaaggaaggatttggacgccaaagagatcccatataaatacttcaaagaggccatcgataaagtcaagcctggatacagctccaacgaggagcagctggtccagtacatgtga

SEQ ID NO: 10160 - DNA, 1347 bp, synthetic construct
  source 1..1347: mol_type = other DNA
atgaaaatcaaggtgattaccaacctgaagctgttaatgattaaaatgaacgtcggaattattggcgggagcgacggcctcgggaaaacaattgtctactacctgagggatgagtttgatgtctacataacgggccgagatcataagaagggtaaggaagtggcttgtaatctgaacgtgaattacattgagagcaacactgaccttgccaagatcagtgatatcatcatcgtttccgtccccatacaccatacctcagatgtcatacgggaggtcgctcagttcatgaaggccggctccttgatgattgatgtaacatccgtgaaagaagagcccagccgcaccatggaggaggtattgcctgacaccgtggagtacatcccaacccacccaatcttcggcccgcggacaaccgagcttgacaaccaggtgatcgtgctgaccgctactaagaagggcgagtggtacaggaaggtgtacgactatctgaataaacaacacatgcgaatcattgaaaccactgccaagaaacacgactatatgatgagtatcgtgcaggtgttaactcatttttcgttcatttcaaccgcatcagctatcgaaaaactcaagatcgatatctccgaaacggaggactatgaatccccaatatataaccttatgatcgacatgatcgcccggattgttgcccagaacccttacctcacgtatcacattcagtcgatgaacaacaatggccccaagattagaaacacattcgccgacgccgtaattgagctccgcgacgtcattaacaatgaggacgatgagaaatttgtggagatcgcgatcaaagcgaccaagcatatgggggacatcaagaacgcactgggtagaagcgataaggccatcaacggactaaaccacgaatttacactgctgaataaaagcatagggactgaggttggcctaaggcacatttactctggaaagatccacgtgggaatcctggagaagatagagaacaaaacggcgatactcagaaaacgcaataaggtgaagaagctgcgcatagctaatatcgaggtgctgagcgacaatgaactttatgagtggaaaatcaataacctcgataagaaaagggaaagcatcagttgcgtattccctaagcgtgttgatgccgaagtcatccaagatacagtgatgaatatcgcaaacataattgacatcaaactgaccgacacatacaacgggccccagatcagcaaaaatagcattagtttgactttcgaagttatcgcactctccaaggaagacattgaaaagattaaggagctgttcaccggttttgggggagtgatccggtga

SEQ ID NO: 10161 - DNA, 4473 bp, synthetic construct
  source 1..4473: mol_type = other DNA
ttgaaaaactcaaagggcaaagtactgactgggaagaagatcaccgtcaattattctggtaaaacttactcacggaccacagactccaagggctgcgttagctggaatgtgcagaagaagccgggaacctattcggtgaaattcaccttcaaagccaagggatatcagaccagcagtaagacagccaaggtcacggtcaaggccatgccaacatcattgaccgtgaataatcttgccttcacatacggtgacggcaacaataagctgaaggcgaccctaaaagataagaaacgcaaagtcttagtcaacaagactgttgtcttcaactttaacggtaagaactataatcagaaaacaaattcgaagggagtggcaactctcacaattggcgctggacccaaaaagtacacgaccacaatctcctttacaaacgctaactacctgaaaagcaaaaagacagtaactgtcaccgtcaacagtatacctacatccctgactgtaaacgatcttacttgcaactatgatgacagcaacgcatacttatatgccactctgaaagataccaagaacaacaaatttctgagcggacagaccatcacgtttaaaatcaatgacaaaagcaaaaacgtcgtctccgacagcaatggcaaggccgggattaaaatagaggagaaaagcggaacatacaatgtggatgtctcattcgccaagagtccatatgctagcattagtaagaagatcaacctcaatgttcagggagcgttaacccctgagatcaacatgcacaatggtttttataacgtctcgaacctcctggtggatttcactggggataacgcggagtacatcgtctattgctcctttgataatggtgcctcgtggtacaaagacaatcacagtctgagctttaatctgactacatgtaactggagcataatatactactctagcttccgcggcttcaacagcaccatcaaccacgttaactacgtgctagatggggatgtgccattggtgtgggccagtcatgggagcggcatttataataccaacttccaggtgaatttgacctccgttgacctgtttgatgagaagcccataatatactacaccttggacgggagcgaccctacagtgcagagcactatttactcagaacccatcaatgtggtaaagaacaccaatctgcggttcttcgcaatggacacatttaaccatagaagtgagataatcagtgtgtactatttcattggaaactgcatagccaatctaaacaacggaaaaacatacaacaccatacagaacgctatcaatgacgataagacaaagaaaggagacattattgaggtgaacaaagatatcatcatcgagaacgtggttatcaacaaaaacatctatctgatctccaacaacgtgatttggcagtctaacaataagtcccctatcatctacatgaagaatgtcaataataccttcattgaggggtttacgtttaagagcgataacgggtcaggcattgaactgaataacgtgtccaattgcgttattcagaataacaacttttacaataagtacggcttcagtatccataatgaaaacaaggacaacgataacctaaataacatttgcatccaaggcaataacttttatgacaactattataattacattaatttcgaagttttagaaaactcaaaaatcattaacaacaactttgagtcgaacaagaacgtcagcgccataaccatcctcaacagcaaatccaatattcttatcaacaaccaatttactaaccttaactacggcattttgattaacaagtcctacgacgacgttttcttcggaaataacttctctataaataatatcgggctttacttaaactgtgtcgacagtaaagtaatttccaacactttcattaacaatcactacgggatttactccataaacgcctctaatctccgcatcaatttcaatcggatcgtagacaacagcaaattcggcgtgtactgcaagaagggtattgtggacgccaataacaactggtggggtaagaattatataacgaataacgccttgaacagcggagacatcaataataacgagaacattggcataaattgttcggcttatctcgttttgaatgtgtacgaaactaactataagatcgataatggcatcgtttataatgtgtcttacgtggctaatctgaggtcaaacaactacggggagatttttaatcagtatttcatcccgaactgtaagattgtgtataatatgtactgtgaatacctgtacgataacggcgttgtgtacaggggggttaaccgaataatcgacctgatgctgtctgagggctcctctattaaggagtacagactgggatttctaaacaacctaaccgtgacactcgaccaccagaatatctcattcttccgagaaagttcattcaatgcctacgccaccatcgatatcgttagttctgcgatctttaacgggtcaaaccttgatatctccgtgcgcgtgccactcgtcgacaacgtcgactggttttccattgtatgcagatacgtggggaacttcaagtccgagctgctgctcatctacaacggcgaggtgcgcaacaccatagtgatcgaaagttccttttataacgaggccaagaacgtgtttagcaataatttctggaacgctctggatacatatcactcgtgcttttccggttaccgaaacaagcagatatgcgcatacgcttacctctacctgaatgacccgagtttgaataccattgaactgctggataataagctcagcaaaagcaacatccaatttaagctccaagacgtgtataatcttctcgctaataacaatattactcttaacgacatcctgcttaatcttatcaagaatagctacagcctgagcgacctcgagatgtcatttatcgattacgcaaatggaaacctgttcgacacaatgagcgtgtccctgaagtaccctggcaacgacagactgttcttcgcattcgaagacaccatcaacaagacttttgtgtggagaggggacagctcagtgagcctctataatatccattatgtcaatggaggctattttgacctgacggcaccattcccaatcggcgacaacggtgacctcatctatgacaacggcaatatctactccatcaactataactgtatttacacattcctgtctagtgactacgattgcctgaaaacctacacctttgccaatagcaagattaataacaacgctctaaattactggctcaatcagaagaaccggactgacgtgaacggggaactgtattacaacatagggtatatgaaggccgcgtacggcagtttccttgagggtttgctcgtaatttactgcaatgatgtggtggctgacgtgagtgcagataagttcaacgtctcctggacccgtgtcaaccccatggtcatgagtgtgtgtgatagtctggaaggttattatctgacgggagagtcggattttaactttgggcgcgaggtagtgggggacgtcaataacattaaaagctttaattttgcttgttcagcctcattcagcatcatcgaaaagtatgtgatcgatgcattattccccaatgaaggcaacaaaagctccgcgatgttctctctgatcgatagcctcttcaacaatggaactctcgagttcatcgtggagggcaactataccctcatccggagcctgaatgtgtccaacgtggtctttgtttacgatgagacgaccggaattttgcgtgattgtatcaacggctgctatggagcttactgctacgccagccagcagactgagtgggggcacaatttcggtgaaaactccctcaaactcgaagatttgattgtgggtattatcaacggcattgacacctcgctggacaacatgaataacgattggctgggtttcgcaggctgtctggcaatcacgattggaaccggcctgttcctggtctctaaccccgtgggatggagcattgccatcggcgccggtctgctgattgggtccggcatgctggccacctactacgcagacgacctgaataaggggtggaactataataggggggcccacttcatcttcgatgtcggcacgagcatgattcccgccggcgctccctcatctctcataaagtggaatgtgggcagtcttggcaaaatcgttttgtccgacggtcatctggtgaggcacgtgacgaagaactccattaataaaggcttcgacaaatatctgatgaaccttgcgaagtctcatggcggaaccattgattacgggtctcacaagatcatccggtacggaacgatagagtccatctcaaataccatgtatgggacaacaaagaaggacttcatatactattccattcaatactatatcaacaaatacatcatcggagacatcgtaatcaacaaaatctttagcaggtga

SEQ ID NO: 10162 - DNA, 324 bp, synthetic construct
  source 1..324: mol_type = other DNA
atgagcttcgacacaaagagaaaaaagctgatcaggcacaccatcctgataaatattatcgtatttctgatcatgctcttcctcagcatctttctgaacaacgaagtgtatctacagtcctgccccttcattctgcttatgataggaggctacatatcgcgcgaatacacggagctgtatttcaagtacaaacataagtattcatacttccaggtttttttcaaggtctgtctttttagcgtcatcgtgagtattatctgctgcgaggtgatcttgcggctgtacttcgggtccagcatttttctcttcattttaaacaaatga

SEQ ID NO: 10163 - DNA, 333 bp, synthetic construct
  source 1..333: mol_type = other DNA
atgtcatttaacgaagagcggggctgcctcatgaaaatcaccatttgtatctatctgctccttctggtgattttcaccagcctgtccatactgttcagtaataagattttcctggagttgcttccaataatcatcctggtgataagcatcgagcacgtgcgcgactacgcgtgcatctatgagaagtactttaagcagaattattccttgtttaaactctacctgaacgtctctactattcccacgattctgttcgcaatctgttgcgaagccctcctgagggtatacttcaactcgagcattatcttaaaatacctaaagatcctcacatga

SEQ ID NO: 10164 - DNA, 384 bp, synthetic construct
  source 1..384: mol_type = other DNA
atggagattcagcccagtcaatttaccaactccagcacggcaccagaaattgctatcgcccttctagaaatcagatacgcgaacacaaagaacaagaatactgtcaagatactgaataaaatcatcaatgaggtaaatctgactgataaggagatcgacgagattctgatcgagaacaacgaaaacaataaggtgttcaccgagaagattctcaaaataattgaaaagtataaggacgacaccaccagcacaatcgccaggatcataggcaaacactgcaaccgggagagcatccagaacgtgaagaaacgacgggagatcaggcgcaaaatcacactgaatctcctgaagaaagaaaacattttgtcaaaaacgaagaagtga

SEQ ID NO: 10165 - DNA, 483 bp, synthetic construct
  source 1..483: mol_type = other DNA
atgtccggtaagtccaatattaacgtgttgaagaatgtgaaaaaaaccgccctggacgaggaaatagcaaagtacgtcgcttaccacaggtactatcagcggctaattgcaattcgcattatcagtgaagggcacagcattgcggaggccgccagaataatcaggaagagctatcagaccgtgcatcgatgggctaaaacatgcgagagcgaaggcctggaggggctcaagccctcatttgggggcggacggccgtccaagctcacttatgatcagctcatcgagctggacaagatcatcgagaagacgcctaacatctcaatgaaggacgtacacatccttgttaatgagaaattcaacgtcaactactcgctgaagcaaataggcaaaatcatgaagaaactgggatacaactacagtaaagcctatcccaagtctagcaaatctccaaaggatgccgaaaagcagttaaagaaaacatga

SEQ ID NO: 10166 - DNA, 1254 bp, synthetic construct
  source 1..1254: mol_type = other DNA
ttggcgtcatacatcatctggtcgttctacattgtgattattcacatcgacatattggtcccacttaacatactgttcctccagctcctgaatcagaaacgcagaaagagcagaaagaaaaatttttacgactcaaagattaatcaaaattcagatcacacaagtcgaaagagccagagcatcgtgaagctgatgaaaattataaagcaggacaccaaggagggaattattgagattgtcccggagacattggatgatctgtggcacctgtcccatataatcgaagagggcgataatgcatcttctaagacaacccgacgtattcaggataacactggagataaacttcggagtgacaggggagtgaaaaaaacattctatctggggctcgacatcgaaaacatcacgtttcacttattcactggcaagctgcggctgaccggcaccattacaaaggggcctgaagacctgattcctctcggctcccatcataccttggaagtaaaactgaacaccccaatcaaaatcaaaaagaggttctggcccaaatgggccatcaaacggctgaaccaggcgattgacgccagcaagaagctatccgccatcatcatcgtctttgaggacgatacagcaaccatcgggctgatgaggcagtttggaatcgagtactacggccccattaagggatatgtgagcggtaaacggataatcgataagaaccgccagaagaacatcgtgcagttctacgacaaggtcatcgagtccatagaaaagtttgactcaatccagaatatcgttattgccggtcccggcttcgtgaagaacgacttctacgaatatattaaggacaactacaagaaccttgcaaagatatcggttatagaggctacgggttctggagggcgcaacggcatcagtgaggtgctcaagaagggcactgtagagaaactgaccgcagagaatagggttgctcaggagatgggagccatcaatcgcctcctcacggaaattgggaaaaattccagcaagatcgcctatggtatcaaacaaaccaaaaacgccatcaacctgggcgctgtctccgagctcctgatcttagatactaaggtggcgagtgagaacatgggcgaactgatggacatggtggagaatatgaaaggggaggtaatggtggtcagcagcgaacacgaaggcggtaagcaactagaaagccttggggggatggccgctatcctaagatatgagattgtgtga

SEQ ID NO: 10167 - DNA, 963 bp, synthetic construct
  source 1..963: mol_type = other DNA
atgttctactcctccatcattattgccttcattatcgtgtttatcataactgccgtcagcaccgctatcctggacatcattttcaggttttttggaaaacggggctacctgggcaatctttacccgaatgtcagagggggcatacctcgtgctatcggcatcattccttttatcgtgctctccttctatatgatccctgtgtgcaactcaatgattctgattatcggtgtgttcgccttaatcgacgacatcctcgggagaaagaagtgcgtcccattaggcatcgagtggggccagctttcacgcggaatcggaattgttttggtgatgatcacaggtattctggaaggatattggatcagcgcaattttcattgccctgatggttcagcccctgaatatcagtgacatgcagccgggcagtgcctgcattgtgactatgataatgtctgtgataaccatgatcttcatgctgattgccgggtcgcccatggtcaatgaactgcccgcggtgtacacgcctcttctcatattcgtagtatgtgccgcttacagccccctcgactttagcggcaaaataatgttgggggaggtgggaaaccataccttcggggtcgcacttggtctagcgttttacctagtgggaggcctctggtccgtgatcctgctcggattcatcacagttgctctgatcgcatttgttagacgaaacaaccttcgggtatttttccgccaaaacctccgcatactgaatccaacatttggggattacttcatggacgtcctgaccgggggagggttgggcgatctatttaggaagctgattctgaaggataagcgattcgatatcaagaaccccctgctcatcagcctcggtttcaggcggctgctgttcaacccatatgcgagccacgcaaaagagtatgccccaaagaaaatccccaagttgggcaaaggcgtgtga

SEQ ID NO: 10168 - DNA, 1053 bp, synthetic construct
  source 1..1053: mol_type = other DNA
atgaaagcctttttcacagtgactggacgagggctggggggtgacgcagtggtggcacttaacaccatggccgcccttcgcaaaaggggtgtggaatgcatcattggcctggacaagacggcttccagtgacctctttgagaaaaacggctttgaggtctgcaagatcagcattccccacgctggtggccatagcgccaccaagctgtctgccatccggggggccctgaagctcgtgaccgctacatttaaggcaagaagcgccatcaagaaaagcaagtcggatttcgtcgttgccgttctgggcggcggagctattgtcgggtccctcggggcgaaattcgcaagaaaaccctgctttagcttaattagtacacccttggactccaaggtatgtcctaagttcaactactgctatgcgctgccagagctagatgcattccgcttcgacaccttgcctaaaaatatggataggagcttttacccactgactgatgacattggggacggcaaagaagaaatcgctctgcagaagctaaaggagtatccaaatttcgacgaaaataaaaagaccatcatattctcttcaggctcatcaatctttaagggcatgatcgatgccattaacatagtagccaactccacggatgagtacaacctcgtgctcatcggacggcccctgcgtgaggaatattacgacctgatcgacgacgagaagataatctatgtggggttcattgattggatcaaccacttattcaagtttgccgacctgacaatcttgaccgacgacggagtgtctcttgaagaggcgatgatctgcggaaaaccgattatcgccctcactaaagtcaagtggggccggtaccagaatatggctggtgtgtttaagggagctatcattgaatcggaggtcaaagatgtgtgtaaaagtataatgaaggcattcgagaattataactccctcaaggagaacgcggaggtctacggcaagcaatgtttcgaggctgccgatgtgctggccgataagatactgaaaaaggttgaatactga

SEQ ID NO: 10169 - DNA, 1302 bp, synthetic construct
  source 1..1302: mol_type = other DNA
atgaagaacatcgtgattggttcggggcctgctggaagactggcatccctgcaactgggcaaactgggcgaggatgtgactcttattgaaaaaaaccatatcgccggcacttgcctaaatgaggggtgcatggtggtttgtgcactcaccgacatcaccaaatttatcgacgcgaacaagcggttcaattcccacggcttccttaagagtcagctggagatctcttacgagaaaatcgtggagagaatcgtggagacacaagagaaactgaggaagcttaatcagatcgaaaacgagagtgtgggcaaccgcataatctatggtgaggccaacatcggaaataacatagtggaagtcaataacgaaagctttgagtacgataacctcctgattgccaccggggcacgcccgttcattcctaacatcaaagggaatgaatttgggctgaccaacaaggacattctgaagatcgacgacgttcctgagaaactgaatatcattggtggcggaatcatcgctggcgaaatcgctaacatctactcaacgctgggtagcgaagtcaacattttcgccaggaacacctttctgaaggaaatcactcccaacaccaagaagtatatattggaaaacctcatgacggatgttaatatctacgaaaacattaacgtggtagaagtcttcaaggacaaggttttgcttgaaaatggggaggagctcgatggaatccccttcttcgccacaggacggaccccaaacagtgaaattgtgaaagacattgtggagctcaaccacgacaaaaccataaaggtaaacgaaatgatgaagactagtgtcgagaacatatatgctgccggagacgtgacgggcggataccagctcacaccagtagcccgcaaagagggcatcacagctgcccgaaacatggcggggtactccaataaaatcacctacaattgcatcccccagagcttatcgttgaacatggaggtctcctttgtggagaatgagaaaagcgagtgtaatgaagaagacaagcagacaatcgccatgccggcgattgcaggcccctccgcattctggaatattctgaatgaggatacaggctattccgagattgagttcgacaagcgtaataataagataaaccggatcaattcaattagcccatctagcgtcagcgatgtggcctacctatcttacattatgaggatgaactatgatctcaatgactatgatgagtttttagagattcacccctcaactgataccaactacaagatcataaagaacatgtggctgtga

SEQ ID NO: 10170 - DNA, 273 bp, synthetic construct
  source 1..273: mol_type = other DNA
atgtgcatcgcagccccagcccatgtagtggaaatcaatagggaagacaactggctctacgcagacttcgggggagcccgccagcaggccaagatggatctgctacccgacgtcgagattggcgactacgtgctgatccacgctggctatgcaatagagaaactgaccgaggaggccgcgaaggaaagcctcgaagcttgggaggagctgcttgaggtgctggaggaagaagataaagagatggagaaggcccggatggcggacttggattga

SEQ ID NO: 10171 - DNA, 504 bp, synthetic construct
  source 1..504: mol_type = other DNA
atgtgggaaaagattaatgagaagttcaaaaagtacccggcaagaattagggttgccgagaagatgatcgagcttggcttgtctctgaacgaggacgggaaaatctactgcggaaatctcaagataagcgacaaggcactcgcgactgccgctgatgtggataggcgagccatcaagtccaccattgaagtcatacaggaagacgaagaattgtacaacctcttcagcaacatcatcccagccggcacactgctcaaaaacattgccaaaaacctgaaactgggagtgatcgagatcgaggtgggctccgagagcgaaggcatcctggcaaacactgctaatttaatcacgaagaaagggattgggatacggcaggcgtatgccgaggacacagaactgcaagagagtcccatcctaaccattatcaccgaggaggtcgtgtcgggtgatctgatcaatgagtttcttaagataaagggagtgacccgcgtatcaatttattga

SEQ ID NO: 10172 - DNA, 285 bp, synthetic construct
  source 1..285: mol_type = other DNA
atgagcgaagaactggtaaataatatcaaggatgctataaccgtgattaatgacccccacatggggattagtatagtcgagatgggcatcgtgcagaacatcaaagtggatggggaccaggctgagatcaccctcaagccaacaaacccgggttgcatgagcatcacgcggattgcagccgatgccaaagtcaaggccgaagccgttgacggaatcgagaaagcgaagattatcgtggagggccatgccatggcagactccattaacgagatgatcaacaggtga

SEQ ID NO: 10173 - DNA, 909 bp, synthetic construct
  source 1..909: mol_type = other DNA
atgaaggtaatatgttcaagcgaggagtccctataccgaccggaagccgttcgctggagacagcgcatggagatgatggagcctctcggggacagtgtggtgttactgccctgcagtatgaaaaagccctacagcaattctaaaagccaccagaagttcaggaagattgcacggtcatatcaggagcttatcgtgacatccccctttggcatttgcccgcgagagctggagaacactttcccaattcagtcgtacgacgtaagtacaactgggtcgtggtcccaggatgaaattgaagaaacgggcaagctgatcgccaagtattgcgaagggaaaaacatcgtcgccaacctgagcggaggatatttggagtcatgtgaaagctatgtggacgacttcatcaatgtgtgcaaagacggcaggccaacttcccctgatagcctgtacaatctgagaatggagcttaagaagcaccagaagatcaacaggaaggagaaaacactgcatgaattgcggtccatcgccaaattccaatttggggaaaacggagataaattcatccccgataacgttaaaaccaagggaatgtaccacaagcggatactgtctgatggtaaacaactcgctctgctaaacaaggaccacggcctctaccgcctcaatttgtctggcggggaaattctgaaagagcttaatacccatatcgtcgagattgactttgacctcacgaccaataccgtgtttgccccaggtatcatcaaggcagaccctaagatcgtgcccaacgatgaggtcattgtcgtcaaggacgatgcggtggttggtgtgggaaaggctataatgaccggccatgaaatggaggagtgtcgtaacggcatcagcgtgaagctgaaacacagagtgaaatga

SEQ ID NO: 10174 - DNA, 678 bp, synthetic construct
  source 1..678: mol_type = other DNA
atgatagacgacatactggtcaagaagctgctctcgcagatcgtagagaaggaccatgaggaaaacctgaagaagaatttccgcgaacggtaccccgatgagtccacccctgacggaatcgacaatcttatacgcgcactagagctgccaccagaggatgtgcagtatattgctaacgacatccgggagacggttgagaaaaccatcagcccaataatcaagtccctgatcgacggcgtggagacagacgaagagatcgcggaaaaaacaggcattaaactgaatatcgtgcgaaaaatcttatacaaactttacgacctgaagattgccaactacaagagaagcaaggacccggagactcaatggtttacctatagctggaaattcgaggaaagtgaactcatcaataggatcaagagtgatagcgagactgagctgtcagagttgaatgccaagctggagaacgaagagcacaacatgttcttcgtctgtccctacggtcacgtgaggtttaatttcgataccgccgccgatccctattacgaatttctctgccctgcatgcggggaagagttggaatttcaggataacgctgagattattgagaaactcaagaacaacattgaaatcgccgaagacaattataactcattcatcgagaaaattgataactcctga

SEQ ID NO: 10175 - DNA, 1200 bp, synthetic construct
  source 1..1200: mol_type = other DNA
atgaacatcccattttccccacccgatatcagcgagaaggagattgaggaagtggtggcagcgctcaagtctggctggatcacaacaggacccaaaacaaaggagtttgagaagaaaatcagcgcctactgtggcagtgacaagactgtttgcctttccgctgccaccaccgctctggaaatgacccttcgcttgttgggtattggtgaaggtgatgaagtgatcgtgcctgcctacacctatactgcaacatgtagtgtaatttgccacgtgggagcgacacctgtcatgatcgacagccaggaatacaaggaggaaatggactactccaaagtatccgatgccataacggagaagaccaaggtgatcatgcccgtcgacattgcggggatactgtgcaactatgataagctgtatgaaataattgagagcaagaaagagctcttcgccgccagcaatggcctgcagaaggcttacgggaggattatcgtcctggcagactgcgcccacgggttcggggctgtccagaacaataagacggcaggaaccctggctgatttcacctgcttttcattccacgcagtgaagaacctgacaacagctgaggggggcgccgtgacttggaaagaacatgagggaatcgatagcgagaaactttacaagcagctccagattctgtcactgcacgggcaaaccaaagacgccctggaaaagaccaaaaagggcagctgggagtatgacattctcctccccgcctacaaatgtaacatgactgatgtgcaagctggaatcggcctaggccagctggagcggtacgactcactgttgaaacggaggcacgagatcattaaaaagtatgacgaaggctttaaaaacagcaaaatcatatgtcccgagcatttctcggaaaacgcaacctcgtccggtcatttatatctcactagaattaaggacatcaacctagagcagcgaaatgagatcatgatcaaaatggatgagaagggcataagtaccaatgtccactacaagccgcttccgatgctcacggcctaccgcaatctcggattcgacatagaagattaccctaacgcctataacttatttaagaatgaaatcagcttgccaatctactccacgctgagtgacgaggaagttgagtatatcattgagaatttcctggacatcctgaaggagtactga

SEQ ID NO: 10176 - DNA, 1887 bp, synthetic construct
  source 1..1887: mol_type = other DNA
atgaatgtagacagctttggaaaataccgcaatttcctcttgccactcatggatagtatcagcgtgatcctgggatattacttgatatctgtgcttattacggacagctttctaatggacccgatcagtgcaataacaagaaacgaaattttaattagcatcatactcgccatcattatcctgcagaccatctttaggttaacaaagcggtactccaatatcatccggtacgagaacaaccaggactatattatgtacatcctcctgtccataatcagcctgctgattgtctctctgattgaggacataatcgggatgaagaacccatccataaagttcaacctgaccaccggcatcctaattgggacactaaccgttgtgtaccggctggtcataagatacgcccttctgtcagatatcgcgaacaaaggaattaactacacacccgaaaaccaggagaaggtcctgatcataggcggagggtattcggccaacaacatcatcaagactttgcaaacctcactgaaagggaagtacaacattattggtatcgtggatgacaataagaagcgtattggctactccgtagctggcgtcaagatcatcggtaaccgcaaggacatcctgaaaatatgcgagaacgaagagatcgatacaatcttcttcacaatcgtgaatattgacaacaagaataagaaggagatcctggagatttgtaataaaaccagcgcaaacgtcaaggttcttccggaccttcgagagatcatatcgtctgagaatctctatggtagtctgagggatattgagattgaagatttgctgggaagagagccagtagaactggataataataacattaagagtctcatcaataataaggtggtgctcgtgaccgggggcgggggcagcattggggaagagctgtgccgccagataatgattcaccaccctaaacagctgctcatgcttgacatctatgaaaattccttatacaacattgagctggaactgaaagataattatcccaacgatgacatcaaggcgattatcgcaaacattagggataaagagcgaatgtttgagatctttgaagaatattccccggaaattgtgtttcacgcggccgcccacaagcatgtgcccctaatggagaacaacccaacggaggcaattaaaaacaatgtgtttggcacttacaacctcgtgaatgcctgcgacaagtataacactaaacggttcatcctgatctcaacagacaaagcagttaaccccacaaatatcatgggtgctaccaagagactgtgcgaaatgatcatacaagccaaggacaaagagagtgagacggagttcgtcgctgttcgcttcggaaacgtgctcggaagcaacggcagcgtggtccctctcttcaaaaagcagattgccaacggcgggcctgtcactgtaacccataaggacatcactaggttcttcatgaccatccccgaggccgtggctttagtcttgcagagcatcacctacgctaaaggcggcgaaatctttgtgttgaatatgggggaacccgttaagatttacgatctggctaaatccctcatcgagctgtcaggactgactctgggaaaagatatcgacattaccttcaccggtttgcggcccggcgagaagctttatgaggaaattcttatggacgaggagaatctcgagggcactgggcacgagaaaatcttcatcacagaacctatgaatttcaccatgcgcgacgtggaggagaagctggacgcctttcgagagatcataaacaaagaaatcacggataaacagatcattaaggaaactatgaagaaatgtgtgcctacgtacaaggaaccaaaggaagttaacggcgagtga

SEQ ID NO: 10177 - DNA, 864 bp, synthetic construct
  source 1..864: mol_type = other DNA
atgacaagcagcaatgagttgaagaatatcaagcatattatcaatggagattacatcatcatccctatcgagacagggtacattaagccaaacgagagcctggacgtgatcattaaacctgccaaggagctaatgaaggataatgattatctcgtaatagctgaaactcccgtgtcggtgtcccagggccggctcatcgacgagtcaaaatatagcccaagcctgactgccaaattcctgacgacagtgtggagtaagtacctctggggctatattctgggacccgctctgggaatcaagaaacggaccattcgaaacttaagaaaattgcccaaagagacctacgcccataaggaactgatcctgcagctatacgggctgaaacacgcactgaagccggcctctgaggccggtgtggacctgagcaacgcgccaggaacgtacgtgtccttgcttccggacaaccccgaagaggtcactaaggacctgaagaagcgcatcggcaaagacgtgtgtgtcatgattattgacaccgacgcgacctatatgaagaacggcaagtacttcacgggcctccccattgctatcgaagggatcgacgccgataatggattctttgggtatgtaaaaggccagttatctgaaaacatgggcagtacaccactggggtgcagtgagaagctcgacgttgagaccgcactgaaaatagccaacatcgctgaagattaccaaaagtcactttccaccgaaatgaaaacaatacacagcgtgaaggatgtcctcggtaccgagtttgacgaagttactatcgaggatcttgattccattatccacacccctgcagtcataattaggaagatatga

SEQ ID NO: 10178 - DNA, 570 bp, synthetic construct
  source 1..570: mol_type = other DNA
atggcacggaaattcatcacatattttgataaggagggaaacgactacactgatgagctcatcatggccatcaaggacaagctggacatcaccgatattaaaagagtgatcatcgccagcgcctccggagagagcgcactgaagctctacgaagccatcggtgatgaagtcgagatcatcaatgtgacgcatcacgtgggcttcagcggctcgaatgaatcagatatttccaagggcatgattaagaagcttgagaaggtgggaatcaaaacatattttggcagtcacgccttcagtggcgctgccaggggagtcaccaacaaattcggagggtacagccccctggacattgtagctaacacttttcgaatgttttcacacgggattaaagtgggcgtggaaataagcatcatggcgaccgacgcgggcctgattcctgctggtgaagagataatagccgttggggggcgcgggcacggtgttgactccgctgtgatcctaaccccagtcaacagcaaagacttgttcgatctgaagatccatgagattatagcaatgccgcgggactga

SEQ ID NO: 10179 - DNA, 1137 bp, synthetic construct
  source 1..1137: mol_type = other DNA
gtgaagtttatagacgacgccatcaaagaatccgagcaacggatggaagagaaggtgcccgacaaactctcgtccgacattgacgacgacctgatagagatgattaagggagcgaaaactaatatatttgttgtaggcgccggcggagctggcaacaataccatcagcaggctgaacgagatggggatcgaaggcgccactacaattgccgtaaataccgatgcccaggacctgttttactcccagagcgccaagaaaattcttctcgggcgaaaaacgagtaaagggctgggggccgggggagaaccggctgtcggggaggaatgcgctgaggagagtgaggatgagatcagagaggagctggagggcgcagacatggtcttcgttacatgtggcctcggtggaggaacaggaaccgggtcagccccaatcatcagcaagctctctaagaagctgggcgcactgactgtggccgtcgctacaatgcccttttcagccgagggtattaagcggcgcgagaacgctgagcagggcttagaaaagctccaggagtctgccgacaccgtgatcgtaatcccaaacgacaagctgttggaggtcgcacccaacctgcccctaaacaaagcattcatggtgtcggacgagatacttggaagggcggtgaaaggcattaccgaattaattaccaagaaggggctggtcagtttggacttcgcagacatcagaagcatcatgggcgggtctggaatggccatgatcgggatgggcgaatctgatactggtgatcgtgcgctggaatccgtccacgaggcactgagcagcccactgttggatattgatatatccaacgctaccggtgcacttgtgaacatctcaggtagttccgaccttacactccatgaagctgagaagatcgtgcaggttgtggctgataaactcgatcctgaggccaacatcatttggggcacgcagattgatgaaagtctgcaaaacaccgtgcgcacgacagttgtggtgagcggcattaagaccggctacgaggaagataattcccctgaaatcgaatatgcggaggacaatagcgaaaataagtcagccgatgatcagctagatgacttcatcgacggaatcttctga

SEQ ID NO: 10180 - DNA, 180 bp, synthetic construct
  source 1..180: mol_type = other DNA
atgaacgtgcaggagaatttcaacaagtttatcaaggacagcaaaagggtactaaaggtcgccaaaaaacccgatggagccgagtaccgggaactggctaagatcagcgttcttggtgtggcagtcattggggtggtggggttcgtcatagtgctgctcggctccctcatcggcctgtga

SEQ ID NO: 10181 - DNA, 471 bp, synthetic construct
  source 1..471: mol_type = other DNA
atggaggataccaatagttccatatatgctctgaaaacctccgcaggtcaggagcgtaacgtggcgaggctgttggcacggaaggcccgaaccatcgacggcataggcatctccagcatcctggtgcccgagagcctaaaggggtacattttagtcgaatcgtcaacaaagatcgacctcaggaaccctgatcttaaagtgcagcacctgcgcggggtggttgggggagacgccacgatcacttttgaggaggtcaaaagattcctcaaaccggaacccatcatcagcagcattcaaaaaggaagtatcgtggaactgatttctggccccttcaagggcgaacgcgccaaggtggtacggatcgacgaatcacgggaagaggtcgttctggagctcatagaggctgccgtaccaattccagtcacagtgaaggcggatcagattagaatcattcagaaggaggccgactga

SEQ ID NO: 10182 - DNA, 480 bp, synthetic construct
  source 1..480: mol_type = other DNA
atggcaaaagatactgtcgaggttctgattgagggcggcaccgccacccctggtccacccctgggtccggctctaggacccctcggaataaacatgatgcaggtagtggaggaaattaacaagaagagcgctgacttcgccgggatgaaggtgcctgtgaaagtcatcgttgaccgcgatacgaaggactttgagatagaaatcggcactccccctacaaccgctctgatcatggaagagttaggcatcgagaaggcctcccacgaaccagggctcgatattgtcaacgacctgcccatcgaggcggcattcaagattacaaggatgaaattcgattcattgcttgccaatgactacaagagtgggatcaaggaagtgatgggcacctgcgtgagcatgggactgtctgtggatgggaaagacccacgggaggcccagaaggacgtggatgcgggaaaatatgacgacatcctgctctga

SEQ ID NO: 10183 - DNA, 639 bp, synthetic construct
  source 1..639: mol_type = other DNA
atgacacaggatgtaatcaacgcggtgaaggaggcaaaagagcagagcaagccgagaaacttcacggagtccgtagacatcatcattaatatccgtgacttagacgtcaagaaacccgaaaatcggtttaacgaggaagtgacccttcctaacggccggggcaaagatgttaagattggagtcatcgccgacggggaactcatagtgcaagccaaggatgctggtctggacactgtaatcaataaaggcgatcttgaagcgttcggaaaggacaggaagagcgccaagaagatggcaaactctgttgatttcctggtggctcaggcagatatgatgcccctggttgggaggttcttgggtcctgtcctggggcctcggggaaagatgccaaaacccgtgcccgcctcgattaagctggccccgctcctggagagattgcagaacaccgtcaaagtgggggttaagcagcagccaagtattcaaatagtggtgggcagccaggacatgtcagacgaggacatagccgagaatgtggaaaccgtgctcaccgtcctagaccgcaacctggagaaaggacgcagccagatcaagtccatgtttattaaaacaactatgggcccagtcgtgcgagtgatctga

SEQ ID NO: 10184 - DNA, 1005 bp, synthetic construct
  source 1..1005: mol_type = other DNA
atggcccatgtcgccgagtggaagaaggaagaggtccaagagatcaaggaaatcattaaccaacacgaagtaatcgggatcgtggatctgatgaacatacctgccaaacagctccaggagatgagaaagtctctcaacggcaaggccgtgatccgaatgagcaaaataaatctgattgacctggctctggaggattgtaatgcggataagaacaacattgtggacctgtcagagcacatggagggccaggttgcccttatagctactgagatgaatccgttcaagttgtacaagatactggaggacagcaagacctcagcccccgccaaacccggaaccattgcgtcggatgatatcattgtacctgagggcgacacaggttttgagccaggtcccttcctaggagagctgcagcaggtgggaatccccgcaaaaattgacaaaggcaagatttgcgtccagaaagagacagtcgtggtgaaggccggggaagaggtttccaagcaggtggccgccactctaagccggatggacatcaacccgatggaggtgggaattgatttgaaagcagtctatgaggacgaagcaatctacacatccgacatacttgcaatcgacgaagaacagacattggctgacgttcaaaacgccttccgcaatgcatttaatctgagcgtgaacgccgccatccctactgatgaaaccatctccaccatcatcacgctcgcatacacgagggctatcaacgttggcgtggcaggcgcaattatgacctccgaaaccgctgagccaatcctggggctggctcaggcgaagatgctggctattgcctctgaagtagcggacgcccccggcgccattgacgatgaactcgctgaaaaacttagcaatgtggccgtcgcagctgcgccagtcatcgaagaggtggtggaggaggaggaagaggaggaagaagaaagtagtgaggaggaggccgctgctgggttaggagccctcttcgggtga

SEQ ID NO: 10185 - DNA, 303 bp, synthetic construct
  source 1..303: mol_type = other DNA
atggaatacatatatgcggccatgatcctgcacagcgcagaaaaagagattaacgaagaaaatgtgaagtccattatcgaggccgccggaatcgaagctgaggacgcccggatcaaggcgctaatcgccgcgctggaggatgtcgacattgacgaagctatggagacaaccgctatggccgcagccgccccagcggccgcccccgccgcagctgaagcagctgaagaggaggaggaggaggaggaggaagaggaggctagcgaggaagaggccgcagcaggcctgggcgctctcttcgggtga

SEQ ID NO: 10186 - DNA, 2703 bp, synthetic construct
  source 1..2703: mol_type = other DNA
atgatcaacatggtcgaaatctttgagaagctcgggtataaactacaaacatgtaagacctgtggacaggagttttacagccaagtggatcgcgacacgtgtggtgatgctccctgtgatgagtacgggttcattgccaatcctgctaccgacaaaccatataatctgtacgaaatccaaaaggtgtttaaggaatttctggaaagcgaaggccacaccgctattgacagatatcccgtcctggcaaaacgctggagagacgatgtcttcctggtgggagcaagcatcttttgcttccagccatggattacctcaggacttgttaagccccctgccaaccccctggagatcgcccagccctctattcgactcaacgatgtcgataatgtgggcaggaccgggcgtcacatgacttgtttcaccatgggctcccacactgtgataaacaccgaggacgattttatctactgggaagacgagacgatccggctttgccacgaatttttcaagtcaattgggatcaataccgaggaaatcaccttcatcaagtcctggtggagcgggggagggaacgagggcccgtgctacgaagtatgctgtcgaggcgtcgagctggccacactggtgttcatacagtatgaaactcttgacgatggatcgaagaaggagatccctattaaagtcgtggatacaggctacgggcttgaacgaattgcctggatctctcagggaactccaacagcctatgacgcctgcttcgcgcccgttgtggacaaactgatggaactaaccggggtggagattaatgaggatattcagggaaaaaacgcccagatagctggaatgatggacattgaggatataggggacctgaaggacctccgccagcaagtggcagacagtttggggctgtcactgaacgattatttggagatagctgagccgatggaggccatctatattattgctgatcacacgcgttgcctcgcgttcatgattgccgacggcattattccatctaatgtcaaagagggttacctcgccaggcttgtgctacgcagaaccattaggttcatgaaagatttgaacatgaaggagtctcttgccgacattatggcaatacagctcgactttctgagcaagttctacccggagattcgcgatagtgagcagcacatcatgaatattatctctctggaggaggagagatactccgccactgtgaaaaagggcaaaagtatcgtgaagagatccattaaacgactcaagaaggagggcaagaacgaaatgcccctgaatctgctaatagatttgtacgacgcgcatggcatcccccctgaaacagtggttgagatcgccggagatgacttcgttgttaatgtgcccgacaatttctttacccaagtggcgggagctcatgagaaggataattccagcaagaaatccacgttcaaagtcgactttcctgagaccgagctgttattctataagtacttctaccagcaagagtttgaggcggaggtgttgggcgtgcttgagaaggatggaaaacagtgcttgatctttgacaagaccatattctaccctgaaggcggagggcagccttctgacatgggtgaaatttcaatcgatggaaatgtgctgaaggtaagccatgctgagaaagtcgacgatgtggtgttgcaccatgtagatgaagtttcccaggacatcgtcggcaaaacgatcctgggcaaaatcgactgggacaggcgcataacactggcccggcaccacacaggcactcacctcgttatcgcagcggccagaaaggtgctgggtcagcacatctggcaagcaggctcccagaatgggctgaccagggcacgcattgatctcagccattaccggcggatcactcaggaggagctgaacgaaatcgagaaactcgccaatgaatatgtcatggaaaacatcgatctggacattcagttccacacacgggacgaggcccaggaattgtacggcttcgtactgtaccagggcgggatcgtgccggggaagatgatccgggtcgtgaaaatcccaggtgttgacgttcaggcctgcgccggcacccatgttctccgcactggtgtagtgggaccaatcaaaattaacaagaccgaacgggtgcaggatggtgtggagagaatcgatttcagcgccggtctcgcagcaattgattccatgcagcatgacaacgagctgctgcgggagagctcatccatatttaaagtcgacaacgaacaactcccaaagacatgcgacaggttcttcagtgaatggaaggcccagaagaacgaaattgacaggttaaaaactcagatcgctagcctgaagatgaacagtctggccgaggactatgaagaaatcaatggcctcaaagtggtcagcgagctgatggaggcggactttaaggaacttcagaagatagccactgactttacggacaacggaaaggccgacgtagtgatcatgggcaacaacgacggcaagatcgtcggggcagcttcgcagaacgctatcgataacggaatcaaaattaacaacgtgatcaagtcggcagctagtatactcggtggcggcgggggaggccgtctgacattagcccaaggggctggtaagaacacagacaagatgaatgaggctatccagaccgcaatcgggttaatcaagggctga

SEQ ID NO: 10187 - DNA, 3057 bp, synthetic construct
  source 1..3057: mol_type = other DNA
atgaaactaaaaaacaagatcctggtgctcctactgtttctggtgcttatttgctgtctgggggccgtctccgcagctgaggacatcaacgaaaccataactgcggattccagcattgacgatgtgaacaccgtgtcggttgaggacgcagtggatgagactgtaagcgacgactcagattccgataagggcatcgtggagaatcaagatgtggaaaaaacaaccatgctcacggaccgaggagtgaatgtgaatgcagcaacatggagtaaactttcacagtatgccggagttattggcaccgactatattatcaccctgaccggggattcctacgctacggatagtcaaatcaagtttaataacggtgccacgatcatcggttcgccaaacaattacatcaccaccggctcgtacaccaaaaccccttttcttaacacaaatagcgctctcaccataactttcataaacgtcaccttcaagaacatgaacgttgactacctcctcagtctggccggaacaaatgtcctggagaactgtaacttctataatatcactgccggaacggggcataacgccgtcatctataacacagatggaacaatgaatctgaccaattgtaacgtgattaattcaagcgcaggttacggcgtggtcagcaattacaagtctggaacctatacaggggtggttatgaacgtcaaccactgcacattcatcaacaactctgctagcgtagagcctggtgctatcaacaactgtggtatcttgaatgtggataattcagagtttatcaataacaccgctacctggtgggccggcgccatccacacccactacaatgcccagactataataaacaactccctgtttgaagggaatgtcgccggatggaatggaggcgcactctatacctacagtacattaaaggtctataattccatttttaaacgtaacaaatgccacacaaatattgggggcggagccattggggcctcacgctggtggtccggcaactacgacatcacaatagtgaactgcactttcgaagaaaacgaaaactgcaacactaatggaaatggcggggcaattactgccttgaacagcggggcccttaacgtgcatgactcaaccttcatcgccaacgtggccaagaatgggcaggccataagcgccttcagtcaggcattcgaaaatatcacggccgggattcccaacctgaaggtatacaataacacgttctacaaccacaccctgactacatccgatacagtggaaatctccggaaactacacattcgagaacaatacatttatcaactgctaccagactaatctggggaccaataacgtcttcatcaaccctgtaaccctgaataacaacaatttgatcctcaaatcaaacaaagagcatttgctgatgagtaacctctctgagaacattcttaagaacgcgcccaatgtaatctatgtagacagtaactcggacaaggactgcgacgaagaccccaatattgacgggcacaattgggagacggcttacggcggaatttttgccctgtccagtgcaatatttaacatatgcgacggtggaaaaatctatctggccgatggcgaatatagctatcggacaaacggcgcgattactcatcccaaaaacctcaccatcatcgggcaaggcgccaatactatcgttgacctgatttcatgcggagaggaaacgacttacacgtgtattttcatcaatctgacggtgtctggcaaggattacggcaggaacaccaacttcattaactgtacgttcattaaaccaattagcatcagcgcggatataaacttgaatagtgtgctgaaggaacatgctgtggagaacggatatgccaatacatacctgataaattttgacaactgtgttttcaaagacgtggtggacgacagaataatcacgctattcgagtacggcgctttgaactttactgactgtgtgtttgagaacatcaccgccgattcaatcgtctatcgcaacagcactggctatttcgaggacgacagcattagctttaggaactgcactttcagtaattgcaagtttaacggcgtcgtggatagcaagaccaattttgatgacgcgattgttattgaggactgcacttatgacggggatgtcgccctgggtacgaccgaggtggacggccacttctatgtcaatgcgactaagctgaaggtggtagcggtggctaccaatatgagcatctctagctctcagcggggggttgtagtgatcacccttagagacgccgagggtaacgcagtgtccggtgttaatgtgagctacaccgtgaacggtgtgaacatgagtggcgtgtccgatgccaacggcactatcacgatttctgacctcaccgacgaggtgaccgttagtgccaacttcactgggtccgaatcttacctggcgtccaataacacggcgagctttaatttcaccattccaaaagtttccaccaagctctatgtgtcgtccgtgaccacattctacaatgcaggtaagtatttgaccgctaccttaaaggattccaacggcgaggtgctcgctaatcagaaggtgacaatcaagatcaacggcaagacatacaataagatcactaatgctaaggggcaggctaccttaaaaatcagcactcttctgccgaaaaagtatactgctactgtcaattacgccggcgatgatacacacatcaaatcttccgctaacgctaaggtcattgttaaaaaggcaaccctgaaactcacagctaaagcaaagacattcaagaaatcactcaagaccaaaaaatacacaataaccctgaaaaacaatgtcggcaaggtcatgaagaagaccaaagtcacattaaagatcaagggaaagacatacaaagcatacaccaacagcaagggaatcgccacatttaaaattacaaagctaacgaaaaaaggcaagtacaacgcctacattaagttcgcaggaagcaagtactacaacagcctgaacaagaaggtcaagatcaccctgaagtga

SEQ ID NO: 10188 - DNA, 1155 bp, synthetic construct
  source 1..1155: mol_type = other DNA
atgaactacgacctgatcatagccagatacggtgagattggcgtgaaaagtcccaagatcaggagccggtttgagaggaagctagtgaagaatatcaaggctacctttgactgcgaagtggatcgcaatcagggccgaatatacattcatccaaaggacttcgaagatggtgtaaagaagttgaacagggtattcggcgtcgtatcgtattcacccgccacatctactactgccacttatgaggggattgatgagaccctcaccaaatacgttggggatctgatatccgaggacctcattgatgagaatacaaagttcgctatcaaatgccgccgggtgggaaaacacgacttctccagccaggagatggccgctcactgtggtggggtggtgcggaacgtcgtcctggccccagttgaccttaccaacccggatctgacaatattcgtggagatccgcgacaataacgcgtttatcttccacgaaaagatcaagggccctggcgggctgccacttggaacacagggaaaggtggttgcactgctgtccagcggaatagactcgcccgtcgccgcttacttgatgatgaagagagggtgtgaggtcattgcactcaattgcgacaactcaccatttaccacccctaaagctagtgagctctttgacgccttagtggatcagctcaacatctacgcaaagggaagccccattaagaaacgagttgtgcactatggggagtatctgcaggccgccaaggataaggcgcccgaaaaaatgacttgcgtgctctgtaaatctggcatgtaccatattgcagagaagctcgccctgaagcttggagcagatgccatcgtggatggaagtagcgtcggccaggtggcgtcccaaacgctgtcaaacatcttggctacccggtacggggtggacatgcctatcctatcccccttaatcggcctggacaaggaagagattacgcaaatcgctaagaaaatcggcacgttcgaaatcagcaaaatcgatgacggtggctgcagcgcggtcccgagatatcctgaaacacaggcagacctggaacgtgtgaaactggcctgtgaagatatgaatcaggacgaggaaattgagaaagccttccgcaacattgtcaggtttgactga

SEQ ID NO: 10189 - DNA, 1095 bp, synthetic construct
  source 1..1095: mol_type = other DNA
atgaaaaccacagtgtcggtgattaaagccgacattggaagtgtgtctggacattgcgttgcccacccagaactgatcgacatctgcgatgaagtgctgaatgaggctctggaagcagggatcataaaggattactatatctcccggtgtggagacgacattgatctgatcatgacccatgataagggggaggagaatgaagaagtgcataagactgcctacactgctttcatgaaagctacagagagagctcgtgagctgaagctgtacggcgccgggcaggatttgctgacggacaccttcagcggaaacatcaaggggatgggtcccggcgtagccgaaatcgagttcgaggagcgccctagcgatccggtgcttgtcttctgttgcgacaaaaccgaacccggcgcatttaatctgccagtattccgaatattcgcagatcccttcaacacggcagggctcgtcatcgacccgaaactgcacgacggttttaaatttgaggtgttcgacgttatcgagcacaaaaaggtgatccttaactgtcccgaagaaatgtatgatctgctcgccttgataggctctaccggccggtacgtaattaagagggtctggaagaagaatggcgagattgcggcggccgtcagtacagagaggctgaaccttatggccggagagtacgtgggcaaggacgaccccgtgtgcattgtgcgggcccagtccgggtttcctgctaatggggaatgcgttgatccctttgcattcccacacatcgtgagcggatggatgagaggaagccacaacggcccaatgatgcctgtcagcgaggccgaagccaacccaatccgcttcgacggcccgcctcgagtggtgggcttgggtttccaggtttcaaacggggagctcataggtcccgtcgacctatttgacgaccccgcctttgatcctacccgggagcaagctgctaagattgcaacttatctcaggagacacggcccatttgaaccgcataggttacccgcggaggagatggaatacacatcactccctggtgtcatgaaaaagctagagtcccgcttcgaggacatggattga

SEQ ID NO: 10190 - DNA, 276 bp, synthetic construct
  source 1..276: mol_type = other DNA
atgccacagaatgaaatgcggaaaagcggcgtgaaaatgcacaagacttacctgctcgagaacatcgacgagatccacacaaccgaaatggggattggaagggtgcagaaaaacctgcaaatcacatccgagcccgtctcgtattgcatttcaaaactaaagcaggaggatagcaaggtaacgaagaagggcaaaaactactacgtgaaggcagacaattgtatcatcaccattaattccagcagtttcaccataataactgcccataagaactga

SEQ ID NO: 10191 - DNA, 1110 bp, synthetic construct
  source 1..1110: mol_type = other DNA
atgtcattcctgaagttcatcctgaaaaacccattccggagaaagaacagtgcaattctggctattgtgggcattgccataggtattgtcgtgattgtgagcctcggtggcatcaccgatggcctgatcaacacttttgaagataccatacacgcaggcggtgccgacttctcaatcagcggaaaggaaacgggaaattcggcctacggaactaatacaattgacagcagttggacagaaaaaatcgccaaggtccccggagttgatgaagcctatccaatttacgtggttctaacgtcggttggcgacgattacatgaatactctcattggcatcgatcctgagggcagtgagcttgcagacatcagcatgaaagagggcaggatatttgaagacaacacgagcgaggtgatcctgggggagatctatgcagaggacaataattactctgtgggagacagtatcatcatcaacggcgaggacttcaaagtgagcgggatctatgaaaccggcgaccagaacatggctggaggggtgtttacatccatcagcaagatcggagagcttatggacgataaagactccatctcaaacatttacgtgaaggtcaataagggggaagatgcccaggcggtggccgatcgaatcgacaccaagtatggggacaatatcaccaccgtcacatccgtgatggagatgacccaaatggccgatatgctaaacatgctgcaggcttccacctgggcgatcagccttctggcgattgtcgtgggggggctcggcatcatcaacaccatgttaatgagcgtcttcgagcggactcgcgagattggcgttctgaaggctgtgggttggtccaacaaaaagatcctgacaatgatcgtaggcgagtcactggtaattacaatagtctccgctattatcgggagcctcattggctttttggcctgcacgctgttgggtccgcagatgggaataaacccactcttcactcccaagatcttcatacaggcttttagcatagcaattatcgtcggggtggtgggagggttgtaccctgcaattaaagccgtaaagctcccccccaccgaggccctgcgctacgaatga

SEQ ID NO: 10192 - DNA, 699 bp, synthetic construct
  source 1..699: mol_type = other DNA
atgaatgcggtggaaatcaaagagctgtacaaaagttacgagggcggaaagataaaagccctgaatgggattaacctcactattaaacagggagaatttgtatctattatcggccccagcgggtctggcaagagcacactcctcaacatgctgggcgccctggacatccctgattcaggaacaatcaatgtcaacgggcatgacttaaaaacctccaaaaagctaaacgagtttagaagcaagaagatcggtttcattttccagctacacaatctcataccaaacatctcggtcgttgagaatgttgagatccccatgtatactcagaagctgagctcgaaggagatgcgattccgcgcattgaagttactggacgatgtgggtctttcagaaaagtcaaagatcctgcccaacaaactgtctggcggggagcggcagcgggtggctattgctcgcgcactggccaacaatccatccatcatactcgccgacgagccgaccggaagccttgactccaagaccagtagtaagattcttaaacaactgattgatttgcacgaggacaaaaacgtgacgttgatcattgtcacccacgacatggacgtggctaagctggcggatagggtgatcgaagtcctcgacggcgaaataatcagcgccggggacgattccctgatcaactccaagatcgatgtgtga

SEQ ID NO: 10193 - DNA, 243 bp, synthetic construct
  source 1..243: mol_type = other DNA
atgaccgaactggaatcccccgagaagatagccaaggatatcctcaaactcgagaggaatctgaaccaggtcgccgatattacatttaagggcaaagagaaggaggtgtacgacagagcgatagactactggaacgacagcaaatattatcttgagaaaaaggacatgcgcacggcattcgggtgcattgaatacagccacggcctgctagatgctttgcggatgatccatggaatcatctga

SEQ ID NO: 10194 - DNA, 570 bp, synthetic construct
  source 1..570: mol_type = other DNA
atgcttcaaagtctgagacctctgctcacacggatcttgaaccccatcgctaagcggctcaacatcaatccgaacatcgtgacaataatttccccattcgttgcgctacttgcggcctatggatttgcaaataaactcctaatcctcggcaccatagccattctgctgtcggggtttttagacgtcgtggatggtgctgtggcccgctatcacgaaaagagcagcaaattcggtgctttcctggattcaaccatggaccgatttgccgatgccataatttacatcggaattatctttggcgggtattgcgattggctggtgggaatactggcaatccatagcgccatctgtgtgagctatgtacgcgccagggccgaatcccaggaggtggactgcaacatcgggattgcagagcgggcggtccgtatgatcatcctgatgatcggcgctatcattggctacttcgcaggcgacatctacttcacgtacattatctacattctcgtgattctgtcttacttcactgtcgggcagagaatactgcacgtttggaggcagttgaatgactga

SEQ ID NO: 10195 - DNA, 582 bp, synthetic construct
  source 1..582: mol_type = other DNA
atgaaagtattaaagaccagtatcgactgcgtggacgagcggattatcaatgaagcggtgaacgtattggctaacggcggggtggtactctaccccaccgatactgtgtatggcctgggagccaacatcttcgataataaggcagttaaaaaagtgtatggtattaagcagaggagcctgctgaagcctttctcaatccttgtgaaggacatcgagtccatcaacctggttgcaaaggtctcctcagcccagaagaacctctttaataagtacctccctggcccctacacgttcatcctgaacaaacgcaatattgtgccgagagtcgtcacaagtgggctggccaacgtcggggtgagggtgcccgactgcgatatcgcctgtaaccttgccaagatttttccaataactacaaccagcgctaatgttagcgatgacgagatgctatctaacccccgagaaattttggagcaactggactgcgatgtggacctggtcatcgacgtgggagacctcgacagcaatgtcccatcctcgattatcgatctgagcggcttcaaaccaaagataatacggaaatga

SEQ ID NO: 10196 - DNA, 705 bp, synthetic construct
  source 1..705: mol_type = other DNA
atgaaggtcttagccaacttcgaagacaatcacaagatcccctcaaactctgcccttgacgtgatgttggcggggggattcgagaaaggaacaatcactcagatatttggcccgcccagctcagggaaaagcaatataacgctgagcgtagccgtcaacgtggctaaattcaacaagaaagtgatctacattgatactgagggcggaatctccatcgataggattaagcaaattgcaggtgtggacttttccaatgttgctaataacatcatcgtgttcgagccaaccagctttctcgagcaaaacgacgcagtaaagtccattgacgcttggctgcgaagtaatcataatgatgtggacctgattgtgctggacagcgcggtggcattgtaccgggtcgatgacatgaagtcctccaagctgaacaaggaactcgggaaacagatgggtctgctcagcaagatcgcccggcagtacgatgtcgccattatcctgacaaaccagatctattcgagctatgacgacgagggcaacaacgatattaaagccgttggcgggaccatcctacagtactggagtaaggtgataattcagcttgaacgcggcgaggagatcaatcagcgcatcgccacactcaaaaggcacagaagtatacctgaaggcaagcaggtcaccttcagcatcacctcaaagggaatcatttga

SEQ ID NO: 10197 - DNA, 1170 bp, synthetic construct
  source 1..1170: mol_type = other DNA
atgaggacggactttgacatcaagaacccaaagaaaaagttcaaaaagaccgaaagggtgcctccaaagggctacgacaacgccaacgatttcttcgaggatatgtacatggacgaaaatatgatttggatgggccaaaacaccaaccacctgcacgacgatacaatagcgaacgcgatgattgacgccatccgtatgaagacctactgccgatatccggccccagaggggttcagcgagctcaaaaagcttgttttgaaggacctcggttttgaagatgaggaggtcctcctcacctctggggccacggagtcactgtatttgtgtatgcaggctctgttgactcccgaggataacgtgattctatccgaccctggatacttcatcatcggcgactttgcaaatcgcttcgcaaatgaagtacggtatgtgcccatctatgatgagaagtacgggtacaagttaactcccgacctactgagagaaaacatggacgaaaacactcggatggccattctgatagatccattgaatccccttggttccagctacacggaagacgaacttaaagagtttgcagagatcgccaaagagaatgacatctacctgttacatgatgtgacctacaaagactttgcccgagagcactttctggtagagaattatgctcctggtcaaaccctgacaatttacagtttttcgaagatattcggcatggcgggcctcagaattgggggggtcgtttcctctaaaccgataatcgatgctatcaagaacgctgttgtcaatgacctgggcgtcaacattatcagccagtatggcgccatcgccggactcaagagcaaggatgtgtggtttgaggatatgaggcagacctgctttgaaaatcagcgcctgatcaaggagatggtggacacagtggacgggatcttcctgcccgtgtatccaagcgacgcaaacatgatggtgatcgatatctatgatacaggcatcaatcctaaagacctgtcaaactaccttattcagaaaggactcttcacccgcgaaggagaatacacttccgatgagttcggagagcggtacctgcgggtcagtttcagtatccccacagaagagattaaaatattctgcgaggagttccctaaagccattgaagctctgagaaagtga

SEQ ID NO: 10198 - DNA, 735 bp, synthetic construct
  source 1..735: mol_type = other DNA
atgatcaacatggacttcaaggggttcaggtaccacaagccgctgcccaatttctataagacagacaatcctctaacccctaaaagggagatttccgacgacctcctgctaaagctggataatctggccaaaaaatataatttcacgggcattagctactcaaagctctccgatgacttcaaaaaggatttcaacatagatttcgacaatgtcattatatttcgcttcctcatgaagaatgagttgatcaagatggaatcttcccccgagaagtcgaagttaatggatatggagtttcaggtatacggcatccacatctacgagtttgcagactttctgagagaaaacggatttcaagccgatctcctgcatccatttgacgacgaccttagcctcaagagcatagctatgcagtctggggattgcatcattacccgtagtaacatctgccttttcaaagaggggctgcacaacggattcttcatgatccacacaagtatcgacaacttgccatttaagaacgagaacgatatgctgtgggtgaaagatttctgttcaacttgtggcgtgtgcattgagcgctgtcccaacgacgccttcgactacgaagaaaacctgctgcgaaaattttgcaccgcgcatcgggagggatgtagcgaatgcattcttatctgcccattctttaagcggggttatgataaggtgaaaagacggtacgacggcatgaaaaagtga

SEQ ID NO: 10199 - DNA, 378 bp, synthetic construct
  source 1..378: mol_type = other DNA
atgaacgacaagattgcgctcgtttcctgtagcggcctgagcccactcggattagtggtcagggccgcaagtgttgaacttgctcttgagaacgaaaatattgtcgcagcgtgcattacagagtactcagcacagccgaacaattgcagccccatactggacgatgccaagatcgtgacgataaccgggtgcggcgatgactgtgcttcggtgatcctaaaggataagaacatcgccgctgtgaagaatatctccctcgatcacgtcgtaaaagcctatgaactgaaccctctggacgccgtgcggctggacgaggacggtgaaaaggccgtcgtggtgctgaaaaaatacatcctgaaagagttggagaacatctga

SEQ ID NO: 10200 - DNA, 1779 bp, synthetic construct
  source 1..1779: mol_type = other DNA
atgactcgtattagcattctggacaaagatagatgccaacctaaaaaatgtgattacctgtgtatcaattactgcccaggggtgaggatggacgaggacaccataataattgacgaggacacaaaaaagccgttgataagcgaggaactctgcgaaggatgcgggatctgtacaaaccgctgcccttttgatgccattaccatcatcaacctccccgaagccgtcggcgagcccattcacaggttcgggcagaatcagttcgagctttttggcctgcccacgttggaggagggaaccgtacttgggcttctcggccagaacgggatcggtaagtccacaatcatgaatattctgtccgggaacctgattccaaatttcggagactttgagaacaagcctgagaactgggatgaagtcatcgagttttacaagggcagctcgctgcagaagtacttccgagatctgtccgagggaaatatcaagaccatcctaaagccacaaatggtggatcagctgcccaaggtggtaaagggcaaggtgaaggacctcctaaccaacgtgaatgagagagataaactggattatgtgacccaagagctgcagctggagaacgttctcgagagaaagatggaaaacctcagtgggggggaactgcagagggtcgccatagccgccactgttttgcgggagggggatttttattatttcgacgagcctacttcatggctggacgtctctcagcgactgaacgctgtgaaagtcatccggtccctggctgatgaaggcaagagtgtcctcgtgattgaacacgacctcgccaccctggacgcactctctgataacataaacatcctctatggccaacctggcggctacggagtggtaagcggaagaaaaggcgtgcggttgggaattaatgcatatattaatggattcttaaatgaggagaatgtccgaattagaaagaatcctattgaatttaccataaggcccccaactccagaagacgagggagatgtcctggccagctactctgacttaaaaaaggagtatgacggcttccggttgagtgccgatgctggtgaaatcttttacgacgagatcatcaccgccttcggttcaaacggcattgggaaaaccacgttcgcgaagatgctggcaggcgtggaagaaccaaccaatggtgagatcgatgaagaagtgaccatcgcttacaaaccgcagtacatcgtttctaactttgagggcactgttagcgacttcctatacatgaatgctcccagtttcggtagcaagatcttcgatagcgagatcatgaaaccgctcacgctggatgaaatgttggacaaacccgtgaacggcctgagtggaggggagcttcagcgcttggcgatcgcggcaacactctcgaaggatgcggagatttacctgtttgacgagcccacagccttcctggatgtggaacagcggctaatagctgcaagggtgatccgcaaaatggtggaaagccgcaatgccgcctcacttatcgtggaccacgacatcgtctttatcgactacatctcagacagggcaatggttttcaacggaacgccaggtttaaacggtcatgcctccaagcccactgaccttcgtaatgctatgaacgagtttctgggcaacctgaacattacattcagacgcgataaagaaacaaagcgccctcgggtaaacaagcttgactcctataaggaccgggagcagaaagagaagggcgaatattattacctgtccgactga

SEQ ID NO: 10201 - DNA, 339 bp, synthetic construct
  source 1..339: mol_type = other DNA
atgaagcaggtgatgatcgtcaggacagacctaaagatgggaaagggaaaaatggctgcgcaatgctgtcacggctcaatcgggagctacaagaaggcatccccagacaaaatcaaaaaatgggaaaatgaggcctatgccaaggtggtcctgaaagtcaagaccctggaggaactgactgaacttaagaagatggccgatattaacaaagtgcccaactacctggtagtggacgctgggcggacccagattcctaccagcagtgttacagtgctcgcaatcggcccggatgaggacgagatcattgataagataacgggcaacctcaaactgttgtga

SEQ ID NO: 10202 - DNA, 663 bp, synthetic construct
  source 1..663: mol_type = other DNA
atgagcataaaacaggtggtgaagatcgggggaagtttgtttccagactacgccatcgatctggcccggcatctcaagaatacggactccctcatcattctaggcggcggtgaatttgcgaaccttattagaaagtatgactccgagatcaatttctcacagaaaaccagtcactggacagctatcgactgcatggacataattgctaagctcgtcaatgacaaggtcgaatcaaccaaactggcatatagcatcgacgaggttcaaaagatcagcgatgaggggttcactccgatttttgtggttagcggcttcttgcgctgtgaagatcccttcgagtgctcgtggaacgtcaccagcgattccattgccgcctacatctcacacctgctgaacgcaaacctgctcatcgtcacaaatgtaaacggtatctacacccacgaaccaaaagagagcggaagcacattcatcagtaagattgacgccaaaacgctgctaaactttcaggagtccagcattgatgtgatgctgccctctctcctgctgaagttcgggactgattgctacgtggtgaatggcaagtaccctgagagggtgctttccttaatcgacgataacataaacgattataacttcgactacacccagataatcggagactga

SEQ ID NO: 10203 - DNA, 162 bp, synthetic construct
  source 1..162: mol_type = other DNA
atgaagacggtggaatgcattagctgcaagcaggagataccactgaccggcacattcgtcgagttcaagtgcccgatctgcggagcaaagatcgcgaggtgcgagaaatgtcggacctttggtcacgcctacaaatgtgaatgtggcttcgaggggccctga

SEQ ID NO: 10204 - DNA, 270 bp, synthetic construct
  source 1..270: mol_type = other DNA
atgggagaagtgctcactacaatgaagatcatgcctgacagtcccgatatcgatctggatgcgattaaatctaccatcgaaaactcaatgccagagagcgccaagctccacgacatggccgaggaacccatcgcattcgggctggtggctatcatactgcagtttatcacggacgacggtgagggcggcagcgagccggtggaagacatggtccagtccatagagggcgtcgcctccattgagattaccggggtaggacggctaatgtga

SEQ ID NO: 10205 - DNA, 729 bp, synthetic construct
  source 1..729: mol_type = other DNA
atgggcaacattatggatagaaccaagaagatcatcatcgcactgataattattgtgttgattatcctggtaggaatcatcgcctccgtatggttcatcggccatgacgttgatctggatgagggcagcaaaaccatactcgtctgcgcaatcgacgagagcgaggatcggccaggtatgggggcctgtgatatggcattcctagttcacctggagaatggcgctattaaaaactacacgcctgtgtatcccggcggcatgacacacccaactgctcaggagcccgcggaggcgcaaagccagggcgccggaagcgacctcttacttcacgacgccttctgggatgtggacaactctaagggcatgaatctcgccaaggaaatcgtggaataccgaacagggtcctcagtcgacagcgtggtcgctattaacactaaagccctggacgctatcctgagcgccgccgctccccttgaggtcaatggtaagataatcaatggaagtggaattgacttcattcgcgaagacggaagtaacggtgtgtccaggggggacgcagtcatggaaatagtgaaggctaccgccaactcggcaaaagacccggtgaagaagagcgccatgatcaatgcggccgtggatcagtactccaaggggaacatcattatggaccagcaggggagttttgttgatctgttggcatcaaaagggatcgaaaccttttttaactga

SEQ ID NO: 10206 - DNA, 1068 bp, synthetic construct
  source 1..1068: mol_type = other DNA
atgtacaagaagatcctggtgcctaccgacgggtcggaggcgagcttcaaagaggtaatcagcgctagcaacctgctggccgaggacggggagattattgtcctctccgttgccaaacagctcaaacaacatccactccagataaagaaggatatcaagaaaaccaacgagaccttcattgagtacgccaaggaaaacgtggaggaaatgaagaagaaatttgacagcaacataaaggtgtccactaaagtggtggtgggcttcccggcggaagccatctgcgatgttgctgaaaaagagggcgttgaattaattgtaatctcttctgccggtgaacggggcttcagtaagagaattattggaagtgttgccggaaaggtctgctcgatatccaatatcaacgtcttgcttatcagcaatgaagaaaaagaactgatcaaacactcaaccactaagaagtccgacaataagaacaagatcaatagggactacacacgattcagaaacgatttgtacgtgctactgcgctttatctctgtggagaagcgcctgaacagcgattaccccgaggagatcatcgattccattgagcggaggatcaaatacctggacctgatctataagactcttaacacacacagcgaatcagaatatgtcaatgtgaaagagtactttaaaaagtacagtgctaatttttattcactctacaagaataagcagccaggcattgagtttgtcaataagagtgaggataatttcaatattcctgataacatcataacgcccctaacggcaataatcaatgaactcattgtcaacagcttgaagttcgcctatgaggactatgatgtggagaaaaagattatcacagagaaggtgacaaaaaacaaagacatctgtgaagtgttctataaggacaacgggaaaggactgcccgacgacttcgacaaagataacccaaccggcctcggttggaccatcataaacgcactggtgaagcagctggacggggaggtaaaagcatacaactccgacggaatgtgcttcgagatgaagtttaagctttga

SEQ ID NO: 10207 - DNA, 915 bp, synthetic construct
  source 1..915: mol_type = other DNA
gtgattaacattatagaggaatttttcatagcaatcggaggcattagccttttcctcatcgacttttttaagaatttctcactcaaggaaatcgaaattgagaaaacgaaagacattaaccagaatatagctcaaaagctcaacttacagaaggacatcaaattgcagaacaacgaaaaagatagcatcgataagatccggaggctgatcatcccctatctgaccaacaagaagatcatcggcctgctcggactgctttttctactaatcaatctgtttataagtctcgagatatccggaatttacatcgtattagtgctgatgacatacatttttgtcttttattaccctcagatccagcagcagagaaattactccgatataaaccaggagctgccatatgcattgcgccacattgggattgagctgaaatccggcaagggccttcacgacacgttgcgaaccatcaaaaatgccgactatggaagcattagccaggagttcaatagaattttggaagagattaaattcggtaagtcgactgaggagtccctcctggaaatgtctaccagggtgaagtcagaggggcttacccgggctatccatcagatcatcagtacactgcgcgtggggggtaacctgtccaacagtctggatatcatagccaaggacatatcgtttgacatgcaaattaagctcaaagaatactctcaaaaactgaactcattcatcctgatctacaccttcatcgccatcctgacaccagtgatcagtttgatcatgctgatggcgtctagcactgttatgggcgatattctgagcagcagcctcctattcattctctacggcgtcttcttcccctccatcgtcgttttcatgggggtgttcatcaagaagctggagccgaagatttga

SEQ ID NO: 10208 - DNA, 1419 bp, synthetic construct
  source 1..1419: mol_type = other DNA
atgaacaataatggtataatcccccaatacgacatcattaaacaagaatatactagcgaggagaagatccttctgggggaaatcagggaaaacctggttgacctggccattagcactggcgaaaacttccaggtaaacgaaactaagttgataaataacattaagaatttcctgttcgagcgcctgaacgacaaccaacagaacaacaatggcacaaacgaatacctcgataacttgagccggaagttgctcagagacatcgtgggctatggggagatagatcccctcatccaggatgatgagctggaggagatcatgattatcggaatcaataaaccagtctttgtgtatcacaggaagtacggcatgatgaagaccaatatcacatttaacgacgagcaggagctgatcgacctgattgatgcgatcgcccggcagatcaaccgacgaattgatcaggagtctcccattcttgatgggcgactgatcgacggtagccggatcaacgccacaattccgccaatcagtgccgacggcccatcactgacaatccgcaaattcaagaaagaccctctgacaataatcgacctgattaagtcaaagacaatctctgtggaacttgcggcgttcttttggctgtgctttgacggtctgggaatcaaatccgctaacgccattatttctggcgggaccagttccgggaagacgaccacactcaacgctctttcagccttcatcaatcccaaggagagaatcatcacgattgaggacaccttggaactgcagattcctcatgagcacgtgatcagaatggaaaccaggccctccaatgtggagaacaaaggcgaactgactatgaacgatttagttaaaaattccctccggcagcgcccagatcgcattatagtgggagaggtcagagctgaagaagcaataacgctattcaccgcactcaatactgggcactcaggattcggtaccctccacagcaacgacgcacgcgagaccataacccggttaacgaacgagcccatgtccgtccctaaaataatgatccaagccattgactttatcatcatgcagaatcggatctacacaagctcgggcgtctcctttaggagaatcagtgaagtggctgaggtcgtcggaatcgaggagggagtggtgcagctcaacaagattttccagtggaacccggaaaccgataccatcgataatgttagtataagcagcaagaccatctcccagattgccaacctcagtggcaagtcgctgaatgagctttaccatgaaattgagaaaagggagctggtattgaagcacatggtgaactacaatattcgttctgtggacgacgtaactgcaatcatagagctatactataaaaatcctgaaaaggtgctaaataacattatttga

SEQ ID NO: 10209 - DNA, 897 bp, synthetic construct
  source 1..897: mol_type = other DNA
atgattgatctgaatgagcagatcaaagccttggactactgcgagaactgcaacgacattcagatcaaaaagttctccccactgaaggacctcattgactttgatgaactgaatggcgaatacatgaaatgcgaatgtggaaagcgaccccttgacattgtaatgagtcacatcctgaagataatgattgaagagaagatagtccctgagaatgcatcactcagacgcaactctcccgtcccactgagcaacttttactacagcaacctgaacccgcagttcatcggcgagggtactttaattttactgcatcccgacttcacctcgaacgtcgctctaaagctgtttaacgaagttcaggaagtgcggtgtgtgctgaaggggagcccccagagtcacatcggtcagttcgataggaactcccaaatcaatcacttcgagattctcataggagacgacgagcagattaacgtgatgcggacgctgctgggggacaagattgtgctcgtgaagaaccaaagcaaacaccatatcgaggtggcaatgaccacagaggagaagctgttgaaacttcataactatctcgacaataataagatcaataagtgcgtggctatcgatgggatgtgcggcctcggggccttgggaatctatcttcttaaatatggctttaagaaagttatattcaacgatatcaaccctgaaatgatcgagaacctcaataagaatctgatcttcaataacattagcgagggattcgagatttttaatgaatccttcgagaacttggacgtgggccacgtggatctgtgtgtcatcgatgcctttccaggcgccgacacatcagagatcgtaaaaaaggccgaaaaaatcgcggatgatgtcctaatcatatga

SEQ ID NO: 10210 - DNA, 1254 bp, synthetic construct
  source 1..1254: mol_type = other DNA
atgatagaaattgtgattgcttgcttcatcggcatactcattggaaccaccaccggccttatacccggaatccatgtcaacactgctggtgcaatcctgtttgcaagctccggcttgctgctgacacagtttagtcctgagttcctctgcgtactgatggtttccatgagcgtggcccacgcgctgatcgagtttattccatccatgctcctgggggtcccacaggagggcaccgccacatcaattctgcccggtcaccgcatggtgctagaaggccggagtaaggaggtaattcgaattgtggctgtgggcgggttcggggccatcatcgtgactatcctgatgcttccaatcttctcgatcatactgccgatcctccatgatatcttgaagccttacacctggatcatcctgctggccgcgagcctctacctaacataccggttaacagtgaacttcagggacttcttgtggagcctcctgctgtttatcctgtccgggattttggggtggaccctcttccagagccccataacttccggagtgacgctgatgtgtaccttcagcgggctgttcggaataagtactattctgttcagtttgaacgatagctcaaccatgcctcatcagaacccattttatgagctgaatattgactacgacaaacttaaaagcatctttacaggaggcatcaccggagccattctcgggtttctgccagggtttggtcctgctcaaggaaccgtcatagctcaggccgtcagtggcacgaatgacaataggaacgatgacacagttaatttcctgcttgcaacatccggcctgaacattagcgactgtctgttttccctcattgcaatatatattatcggcaatccccgcagtggcatcgccgtgtatatgtcttatttaatttcagaaatgaacatcaaccacctcatcatattcatcttcgccagcttgcttgcggtttctgtgtcactcatccttgccctaaagttaggtgattcgttttctagactcatgggaatcgtgaactataagaaactttccatctccgtcattctgctgcaaatcattatcttatacatcttcattttctactacaagtcgcccacgtgctatatgaccctagccctgattacttcaacggctttgggcatgctgccccactacatcggtgtcggcaagtctcacctgatgggggtgctcatcatcccggcaattgtaatctacatgaaaatgtttatctga

SEQ ID NO: 10211 - DNA, 465 bp, synthetic construct
  source 1..465: mol_type = other DNA
atgatcgagtatgacgacataatcaaggatagcccctttctcgccaaccatctgattaccttgaataaaactcacgatttctacattaacaagcacatcaaaagcggcaccgacattctgccaagtcagtactatatgctgatgttcctgtactatgagatggggacaacacagtccgatatcgcgaaagcatgtttgatggaccgcagtggcgtgtcgagagccttcaaagatttcgaaaagaagggactgatcaagcggaaggtcgataacgacaataagcgagcctacaagataaagttaacccagaaaggtattgagacggctgagttcctaatcaaaaaagagaaggaatgggacaacatgatctgcgagcagctgtacatctcaagggaagacctccttaaactcctttccaagatttctctcaagagcctggaatttaatcggaaccagtttcaatga

SEQ ID NO: 10212 - DNA, 498 bp, synthetic construct
  source 1..498: mol_type = other DNA
atgaataaaaaggagattatcatcattctgatcttcatcggcttttgctttgtctttgccggacccgtattcgcaaaagaaaaggtgaaggtcaatgtgtctatcgacgaccatcctctgaacaacaagggtttcatcgtgatcaagctcgtggacagtaggggcaaggatattgaaagcaacggaacaatacactacaaaattacggacgagttcgggaactataagtgggcttataaatcatacgacggtgagatccggctaaagtatactgcggggatctacaaggtggacgtcaagttcgatggagacttccactataacagcgccattaaaaataaatccgttattgtgaagaccgagaaatttaacccatacacctactacgacaatcacaattggggcctgaaccaggagatagatgactatatagaatacaactactgggatgaagatatctatgatgaccccacaaactacgatggggagggcccgtga

SEQ ID NO: 10213 - DNA, 2019 bp, synthetic construct
  source 1..2019: mol_type = other DNA
atgaagaaattgatcgtaggactggccggaaaccccaatgtgggcaaaaccacagtatttaaccagctcacgggcatgcgacagcacgttgggaactggccgggcaaaactgtcgagagggccgaggggcacttcacccacggaaattatgagtacgatgtggttgacctcccgggcaattatgcccttagtgcccattccatggaagagattgtgtcccgcgactttatcgtcgacgacgactctgacgttatcgtgaacgtcgtggacgcagccaacctcgaacggaacctgtacctgacagtgcagatgatggagctgggtgccaacctcgtattggccctgaacatgaatgacttcgcaaagaagaaagaccatattattgatatcgacctgatgtcggagctacttgggttctctgtggtggagatcaatgccaagaacaaggacggatttgacgttctactgagtgctgtggaaaaggcggccagcaaacccaaaaatacaagtgctaaactcagctatggggacgagctcaaggaacacctcggggatctccaggagttaatcgaacgagacaacaagctgctcgatgtgccatctatttggacggccatcaaactcctggagaaggattccattgtcatccagaaagtccaacagagctcaataagctcgcagatcatggccgagaccgacaaggtggcaggtcacctgcatactatttacaaggagggtgcggaagaggtggtcgctaatgctagatacgcatttattgatggcttaatggccgaggctgtgaaacgccctgccgtggagaaggagacaattactgataagatcgacaaaatcgtgaccaacaggatactggcgcccttcatattcatcattctgatgtgggccatgttccagctaacatttacagtgggagcccctttccaggacatgatcgatcaggcctttggcatgctgagcgagtgggtcgctacattccttggcgacgggctgttaagctcattcgtctgcgatggcattatagggggggtgggcggcgtgcttacgttcctgcccataatcatcctaatgttcctctttttgtcaatcttggaggattgtgggtatctcgccagggcagcctttacgctggataaaattatgcataagatagtggggctgcacggcaaggcgtttattcctatgatcctgggatttggttgcggtgtgcctgctattatggcaacaagaactatggaaaatgagggggatcggatgcttgctatgatgctggttccatttatgtcttgtaccgccagattacccatttatgctatctttgtggccgcattcttcgctgacaatggaggcaatgtcctgcttgccatttacttgctcggcatcgttgtcgcgctcatcgtggccgcaatcctgaagcgcaccatgtttaaaggcctgtccaccccgtttgttatggagctccccacgtacaaggtgccctccctaaagggcgtcctgctgcacacctgggaaaaggtcaagggattcctgcggaaggcaggcactatcatccttgcttgttccatcgtactgtggattcttcagaacatattcccatacggcggatcagatcctcagatgagtcttctgggtatgatcggcactgcgatcgcccccatatttgccccattgggattcgggacatggcaagccgcggtagcaattatcgctggtctggctgccaaggaagtcgtggtggccaccttcggcactctggcggggatggaggaagacgatgaagaaggaattacaaacctgatacacgacaccttcaccccactctctgcattcagcttcatggcctttaccctgttgtacactccatgctttgctgccattggtgcaattaagcaagaaaccaactcctacaaatgggctctgacgatgtgcgctatcaccttggtgaccgcattcatcgttagcttcctcatctataacatcgggctgttggcaggattcggatga

SEQ ID NO: 10214 - DNA, 228 bp, synthetic construct
  source 1..228: mol_type = other DNA
atgaaaacactaaaagatgcaaaacccggggaaaccgtaaccctcgtgaagtatcatgatactggagaccttgacctccggaggcacctgctggggatgggcttcatcaagggcgccaagataacactgaaaaaggtcgccacgttgggagacccaatcgagatgaacgtgaagggctacgacgtctgcctgcgcaaggaggaagctgagaatattgaggtgatgtga

SEQ ID NO: 10215 - DNA, 207 bp, synthetic construct
  source 1..207: mol_type = other DNA
atgaagtgtaggatgtgtggcttcgagttcgacgaaaatgaactcgagaaccgcggctgttcatcctgcgggaaacataactgcaatcaggtgcactgcccaaactgcggattcggaaatagccccgaactgggccaggagttcgagtttataaccaagctgaagaaccggtttaataaaaacgaaagcgagaacgggagtatctga

SEQ ID NO: 10216 - DNA, 843 bp, synthetic construct
  source 1..843: mol_type = other DNA
atggaaaaaatccatctggagaccaaaaacctttctttcacttaccccgacggcactaaggcgctgaagaacgtgaatatccagattaagaagggcgagaagatcgccatcatggggcccaacggggccggcaaatccacactcttctcccactttaacgggctgacggagcctacaagcggacacgtggagatcgatggggagaagattatcttcaatcgggaggagctactgaaagtcaggcagaaagtcggaatcgtctttcaagaccctaatgaccagctgttcgcaccaacggtgaaagaggatgtggctttcggtcctatgaatctgggcctggattacgatgaagttaagaacagaatcgccgagagtttgaagatggtgggcatgtcgggttttgaagacaagaccccccaccatctcagtggaggccaacagaaacgaatagctattgccggcatagtggcaatgaagcccgaaattatgattctggatgagccaacagctgggctcgatccagagggtgttgacaaggtgttgaacatcttgaataaccttaataacgagggaatgagcattgtaattagctcccatgacattgaaatggtaaaccactttgcagacaaaatattcattttatacaacggggaaataatagccaaaggcaataagcaccagatcttctcaaacaaggaactgctgaagaaggcccacctcaaggcgccgaccaccaccgaaatcctgtataaactaaaggagaacggacttgacgtcaatactgaaaaaatcacagtggacgagaccgtggaagagatcctcaacatcgagcgcatcaagtga

SEQ ID NO: 10217 - DNA, 831 bp, synthetic construct
  source 1..831: mol_type = other DNA
atggtggacattacgcagattatgaggttcgacgagctttcctcccagaacagccccatacataatctcgagggccggattaagctgataaccacgatctttattatcctggtgagtgttatctcaaaggaactcttcatccccataatactggagatcatcctcttgaacatcctgaagatcgccgacctgtcctacattaactctgcaaagcggctcctgatgttgctccctttcggcggggcgatcattgtattccagccattcattcagccaggtaatataatctggagctactcgtggttgcacatcaccgattttggccttaattgggctattctgctactggtgcgcatgatcgtctgcctgactgctataatcatctattcatccacaacccccctacaggaaatggccagttcatttaggaaactcaagatgccgagagacctggccatgatcctgagcatcatggtcagattcctgtttctttttgtggatgagctcgccgcaatccgaaagagtcagaaaagccgcaatttcaacatccacagcaaaaacaccacttacaaatggcgcgtcaaacaagttggttacacaatcggaatgatgtttctgaaatcctatgaacaaggagagcgtgtgcacaagagcatggtgagccggggattctccgatacatcagaaatgtttgacgagaagaagtcgcctgaaaaaagcgattatatcttcattatcagcattattattgtcgtgatcatactggagattatcatgttcaagtacagtgggcagttagggtacttcggccagaacttatctattaactga

SEQ ID NO: 10218 - DNA, 306 bp, synthetic construct
  source 1..306: mol_type = other DNA
atggacaaaaaggacatgtccctaatcattgtggcagtcgtgatatgtattgtaatcagctgcctttcaccatacatcgccagcggcgatccagacggcttggaaaagtccgctgaggatgcgagtgtccctgaagacttccagattgagcccatcaacggaatcccggacgctatcttccccgattatgcgtttgccagcgcccccgataaccagggactgcaaatcgtggccctgatcataggcgccattctcaccctcggtgttgggtacggggtggcaacaattctgaaatcgcggaattga

SEQ ID NO: 10219 - DNA, 639 bp, synthetic construct
  source 1..639: mol_type = other DNA
ttgcatatacccgatggtttcatacctatcgctcagtgtctggtgtactatgtaattctcatcgtcgccctctacttctctgtgaagtgggccaagtccaacctggatgagaagcgcataccccttctggccgtgctggcggcggggatctttgcaatcatgagcatgaacatgcccatcccatttgggaccagcggacacatggtgggaggggcgctcgtggccattgtcttcctagcaccggaggctgcggtgctggtcttcacagttgtgctgctaatccaggccctgatcttcggcgacggcggcattactgctctgggcgcaaacgtcttgaacatggccattgttggagggtttgtgggtctctacaccttcaaaacattgaatggcaagataggaaaatatcctgcagccggaatcgctgcctggttagccaccgtgctggctgcacttgcctgcgccattgaaatgggcattgctgggaccttcccagtcaatgtgggcatcccctccatggttctgtaccacttctttattggtatcatcgaagctatcctgacggtaatcgtgctggtcgccctcgacaaatttcggccagaccttctctcatggaataagactgagggcagtgcatga

SEQ ID NO: 10220 - DNA, 1275 bp, synthetic construct
  source 1..1275: mol_type = other DNA
atgagcattatttattccaagataacttcagtgataaacaagataagcgatgagattcaccggtctttcctgtttacaacaatattctctattctcaggttcattgaactccaatggatcaacagctatttcaaggagctgtatcccaacgagaagttcctgaatttcctgaacaacagtatcctgaagaagaatctgtttaacccattaatcgtccttctgctattttctttctttctgatcctgtcaataaaatcaccctctaagagtctggtgatcacgctcattgtcggcttcatagcattcttcataggtagtaccatcctgccaaaatacttcctgaataataatatccggatcatcgaatttaataaaaaggacatctattcgattgggttttgcctgatcctggtgagtatcatctttttcggaatttgcattgcgtctgtcggcggcatccctcttctcaaaccctccataagatatctgctcaaaccaatattcacgatgcctgtgtttctgatcattccaggcacctgcctagtggcctccgcttacctcaaggatttccagatgaagaacatcacgcggagccaggcaaggttccgcttcatctttttgcttgccatcgacactgccttattgctgctcctcgggtacagaacaccgctagtagcagcctttctcatcattattatcattgggttttacggcaatatcatttcactttgggaagtgatcatcagcgggctgatcggtatcggggctatcataggcatcggttactttcgatcccttagcgagatgacaattacctccagcaccaatccgttttacacccttcagagccgcgcggatttcaccctgcatgtcctgaacttgcttgattttgttgggggcaacgctggactgacacacgggcacttgttgaccagttccattcccggatcggacctcggacctcgtatgctcattggcaagattattgcctggaggactgaggtgaccgtgacccccaccctaatcggccagatggttgtcgacttcggtaaaatcggggtagcagtggagatgtgtatcctgggattcatcctgggaatcggctttaagatcatgcagaaaacaaaaaactatttctacatcgccatttactccttgattctgacttacagcatcttaggcattgaaactggaattttggacatacaggttctcttctacttcgctacggccatctttatctatctgattaacatcaagaaatcccaacagtga

SEQ ID NO: 10221 - DNA, 774 bp, synthetic construct
  source 1..774: mol_type = other DNA
atgaagatcaaatttactctcattgactacctcatcatcatcctggtcgtgtgtgctatttcatttgcattcatacatataacaacagacaactcatccgaggtgcagaaaaccgtgttcgatgcctcgaccatcaataaaatccccgatacttatttcaactattatagggatgggtatatcgttggcactaccgtcgatggattcaatgccagtactggggagaagataacactcaatggcacgatcaagtggattggaaataatggtgggaccgacgtgaagatcctggtcgaatccgacaacaccacgtacctggtgggtctatacaagtccattcccgaggcggacatctacatcgacaaaatttcactagaaacgaacggcagtacctacccgaacctggtggagatcaaggccagtccagagaacatcagcacaatcaacgacttgaataaaaacttaagcaacagtgatttcgaaataagcactattatctcgctggattccctggacctggtgaaaatccaggagattgccaacaagattaacagccacgataaacgcatggccattaagacccctagctccggactggggaacagcctgatattggaaaatgctaacaagcaaacacttgacgacgcaaatagcgttctgggcaatattaacggcctcaccgatgaacttacaatcagaatctacaactgctccgacagccagctcgagcaggtaaagaatagctacaatattaccaacatacggaccttttga

SEQ ID NO: 10222 - DNA, 156 bp, synthetic construct
  source 1..156: mol_type = other DNA
atggaagagtgcggagtttgtgaggactgcatcgatgtgtgcgtcgaagaagcaatcgagcggaaagcctacaccgtaacaatagacccagagaagtgcgataactgcggcgagtgtgtggacgtctgtcccgtgggggcgatttatgaagagtga

SEQ ID NO: 10223 - DNA, 561 bp, synthetic construct
  source 1..561: mol_type = other DNA
atgattaagatcgctacagccgagtgcttcacccacggaaaaatcggacgggagctccatgcactagcccagaactacgaggggaattttggaatggaatatatccaaaattctaagcagtatggtaacttcgactacaacgaactgaatgtcacctgcagcctcttcatcccgacgctggaggccgttaaaaaaatcttgaacgtgaagaaccctcccaaaccagatactctgatcaagggcatcaaggtctacaacgaggaaaaggacaaaactgtatccaagattatggccaaggcggtgaaggaactcagcgactgtgatattgccattggcacaagtgcaggcataggtcgcgggggcataacgatcctgactaacaattttgagatcacaaccaccaccgatatttacgctgaccttaccgacaacaatagcagtgatttattcaagaggtcagaatccgggattaaaaaaacattggagatcatactccttctgctgaataacaattttgacagaatcaactcgctggagaacgtggagattatcaagaagtga

SEQ ID NO: 10224 - DNA, 651 bp, synthetic construct
  source 1..651: mol_type = other DNA
atgattgatgaaattcaaaagatggaagatctgcaggtgccaaaaggccgaattgacctgatcggttgtggccggctcggattgaggatagcaattaacctcatccaaatccacagaggagggccgaaggtcatcggcgcctttgacgggcagaagatctctgatggcgacattattttcaagctgtatggggcggagcttgatgagtccaagcccgacttcataaaacgcttatgcacgcatgacaaagagttccgcaagatcgaggtgcataacgaatacatcaacgatgataacctggacctgataacgggggacgtgataatcattgttatcgccggcggcaacacaatacctactgctagcaagatcatcaagcacgcgcagaagaaaggtgccaagaccattagtaccgccggaattttcggctttgggaacgagcacatcgagatcaaggacattagcgaatacgataacaataatcccgctatcgaagagttgagggcccagggagtaactgagaaccacctcgtgctgaccacaaataaactgatccgggacaatgagcccgtcacaccatacaccctggacgaagtggcaaaactcatcaccatctgctcactaaagctgcttaaagatcagaatgactga

SEQ ID NO: 10225 - DNA, 696 bp, synthetic construct
  source 1..696: mol_type = other DNA
atgaagcttaaggagatcatcagcttcatcaacgagcgcatacctgaggacctggccctcaaacacgacaacgttgggctaaacggcgagtatgacctgaaccaggagatcacatccatcaagattttcatggatctgctgccggatgacgacaacggggagaatacattgattataacccaccatcccccactgtttatccctaagacacccacgtacaccatccattcaaattgggacgtcattaagggcggctccaatgatatcctggccaagaccctgaaattagatgtgattgatgtgctggacgagaagacaaacattggacggatctgcaagactgactattcgtttaatcagctgaaaaagatcatcctggacaaatacgaaaacgtaaggattgtgacgcagctcaatgacgattacatcttaaacaagattggcaccatatctggattcgggcttaaaaacagtaagtatgtcaagttggcgaaagaaaaagaactggacatactgatcagcggtgacttgacccaggaaactgctatccttggcaagaatctcagcatcactctcattgatctaggacaccacgaaagtgaggtccccggtctgtaccaactcgcaaacctcctcaaagagattaacattaatatcgaagtgattgataagaccccaatcaaagtgataaagtga

SEQ ID NO: 10226 - DNA, 798 bp, synthetic construct
  source 1..798: mol_type = other DNA
atgaatatcgacacgggaattacttcagaagtattcacaatcaaatctcagattcgcttgctggacatttttaacgagattatcaataagaagtcccaaatcgtctatgagtacttgaagtcgctcaacctggataataatgttaagataatcgtgatcggcacgtacttcactggactggggatagtgaagaagcttagcgaaaagtacaataacattatcttggtggacatttatccccacctggaacagctgttatacaccaaaatcggcggggagctgaagaataacatcaagttcagcagcgacctaaatctgatctacaacggggatgtggtgattgataccacgggctttggcggaatcaatgtcgaacagagctccaaatttaacgttaatacattcataatcgaagatccgattgctgagaacaacgacatcctcctgaagcataagaacaacatcctcaacagaatcaacgtggtgaacagtcagaataaagcgattataaaaacaaaaggcatcaacaccaaaactagcgggaccatgagtctgaccatgcggatactcacaaacgccctagacaactgccttaagaaggagggtgtcctctatagcgcctgcgaaatgggttttttcgaggagatcatcttcaaggagaaaaatattgataaattcattgaactgaccaatatgcctgcaatcaaagtctccacaataaaaccatttaattgtaacgagattatcaacagggagcttgacaagatcacctcaaagatgattctgaacgagacttga

SEQ ID NO: 10227 - DNA, 486 bp, synthetic construct
  source 1..486: mol_type = other DNA
atggcattcgaaaagatgatacacgatgcctttgaggagagccggaataacagccgcctcggcgatacaacggacgagataaacgagatcaaggagtacattaagaatgcgaaaaaaatctatgtgccaaacaaaaacgggattaaggtcaaagtgttaaatgaagtactcaacaaatatgggcttccagaagctgagatcctacaaatcaacaccagtaccgccgacacctcgcgcatccccgccctggcgaaggcctacatggctctggaccagagcgatgctgacctgattatcgcccggggccgactgggcatcccgggtagcggctcactgcttatcttcattgacaataaaggaagaatactgacttgcggaacatccccttcccatcccattcacaagaagagcctcgagcaggcagtgtacgaagaggcctgtgaggcactggaaaagatcgggttcgataagaggttgaagaaatga

SEQ ID NO: 10228 - DNA, 999 bp, synthetic construct
  source 1..999: mol_type = other DNA
atgatcgacgacattctgaacaaagccaagttagggaaaaaactaacggacgaggagtatctggagctattgaagattgacaacaatgactacctggagaagctgttcagcatcgcttgttacatccggaatagccaatcaaaagagataaagctgacaagtactgtccatatcaccaacaaatgccaaatccagccaaggtgtgaatactgcggattcgctgagaagaccagcagaaccggatattacgatgcgttctacaaaagcaatgaagaaatccttaatgccatcgtctccatccagaaggcccacattcctcgcgtgagctgctctggcggctacggatataaaggcaggcaggcagtcaacgcatgtaagatagtaaaggaaaactcgaatctggagatcctcattaacgtggggggcgacctgactgaaaagtccgttgaagagctggccaaattgggcgtggatacagtctgctgtaacctcgagacaatcaatgaggacatatttaacgagaggaaacccggtgatagcttgaagcagcgcattctcacgtgcagacgagtgagttccgccggaattggtctgtcaagcggactgctcctgggcattggagagagtgtggaggatcgcctgaaacacctccggtacttatccagctttaagacgcttgaggagattccgattatgggtttcaacccctatccagataccgcaatggctgactatcctagcttccccctcaaggaacagttgaagatcgttgccatcacccggataatgtacccctcaatccgtatcaccatgcctacaccgaccgtggggccagaaaatgttgaattttcgctgaaggcaggggcgaacaacctcgctactgtgatcgccgataattacccccttgaagtgaagggggtgggctccccagaatatggcaactacacagaggtaatcaacgtcatagagaagctggggcttatccctcagactatttga

SEQ ID NO: 10229 - DNA, 1014 bp, synthetic construct
  source 1..1014: mol_type = other DNA
atgaaagtggccatccttggggccggatgctatcgaacccatgccgctagtggaatcacaaacttcacaagagcctgtgaggtggccgaggcgacaggcaaagagaacatctcgatgacccactcaacaattgagatgggcgcggaactgctggagctggctggagtggacgaggttgtagtgagcgatccaacctttgacggcgaatttacggtcgtggatgatttcgactatgccgaagtcatagccgcacacaaggccgggaatcccgaggaagtgatgcccgccatccgcgcaaaggtggcagaactagccgagacagtgcccaagccaagcaaaggtgcaattcacttcacgcacccagaggacttgggcatgaaagtcactactgatgatagtgaggcagtggctgatgctgattgggtcatgacatggctgcctgaaggcgggatgcagcccgacatcatcaagaactttgccgacgacatcaaggagggggccatcgtcacccatgcttgcaccatcccaactaccggcctgaataagatcttcgaggacctcggcaccaacgttaatgtagcctcctaccacccgggggcggtgcctgagatgaaaggacaggtttacatagcagaaggttttgcggaccaagattccatcaacactctcatggatctcgggaaaaaggcacggggatctgcattcaccttgccggctaacatgataggccccgtctgtgacatgtgcagcgccgtgactgctattacctatgccgggattctggcctacagggacacagtgacgcagattctcggcgcccctgcaggcttcgcccaatccatggctaacgaggctctcacccaggtcactgcgctgatgcagaatgagggaattgacaagatggatgacgccctgaatcccgctgctctgcttggtacggcggattcaatgaacttcggtagcctagccgaaattgtgcctaccgtattagactacctgggaaaggacgaatga

SEQ ID NO: 10230 - DNA, 1497 bp, synthetic construct
  source 1..1497: mol_type = other DNA
atgtacgacctgatcaaggaggccgttcacagtgatgaagcggccatcgaaatatccaaaatgaagaaagatgtagggtctgtggtggatgcaatatccgagctatcattagacgacaccatgaaactcggaatgagctttaaaagattccctctcggctgtgatctgacagaggtggtggtgggcacatgtgcttcggacctcgaactcatggatctgctgggcaactgccggctatctgatatgatcggcgcgccaattcatatttgtgcttatgccttttctgatatcggcgagaagttcggaatgactgggtttgaggtaatgaaaaaggtgcacgaaattgtggatgttcctcttgatctggaccatttcggcgagaacggggcaatgcgcctcccaaagaacattacaggttgcgggggtgagtgttacagcaagggaccctccttcacggagtgcccccggggacgcatccatgaacgactcatcgacaaggagtttgaacaaaaggaggacaaggagaattgggttaaactgtcgtcatctgttgccgtgaacgtgtccagcgaacagacgggtgatgctcatgccgcccccctgagtgaggctaaggacattgccgtcctggccaagaagtacggcaagggcctggagagcataatgttcgttggtgacggttatgacgaggtaatcaccggcttcgagaagtccatcgacctgggggccgacgtcatcgtcgtggagggagggcccttcaatcgttgcgagaacaccacagaatcattcgcaaaaaccatcgccgcggcaagaattttaagccctggaaaggtcgtcgccacgaacggcgcttatgagcacgaacttcgaatgggactgaggagcgggcttaatatggtaatcaccggcttccctaagaaccaccacggctatatgtgcggatacgagccgggaactgcaagaagggggaagttcggcctcccacgggtcgtgcagataatcaacgaagagtttccaaacatgggcctgcccgtgcagaaacaggatttgatcgccatcgccgctgcagtcaagttcgccggcagcgaaaatatttaccccaacaaaataggaagttaccacgtgggggatgcgcactgggcaaccttggtcaattccaggatgtaccacaacattaaacttaaacataccctgaacgacatcgtgaatttggttgaaggtagtactgtctccctgcacggggggcgctttgtgtcgtgggtgattgccaaagaactggacaaaaaggtggaggaaataattatttccgacgtcgatgactgggtgctgagcaacaccgtgaataatctgcaagacgaactcaatgctacaatcatcgctgagaatgacgacaagcgggccagcagtcaggcaaactttagcatcgcttcatcaacaatgatcagcattaaggagaacattttgaagaaagtcccgcacgcgctaactatcgtgtga

SEQ ID NO: 10231 - DNA, 900 bp, synthetic construct
  source 1..900: mol_type = other DNA
atgaactataagaagctcgtcctggtgggctgcatttccgcattcgtggctatcctgacttcagttatgggagttgcggggacaattatcggtagcgtgatctcatctgttctgtacaacatgcttaccgaggtcttggaaaacccgattgggaaaaagacattcagccccagctttgaatgggagattgcctacgtatttccactaatcgtcatagccataatccagttcattctgatcagcgctctgctatccgaggtgggcattctgccttacacctttgtaaatgtttacctgagcattcaggagatcgccaacaacaatctgtaccgcattctgggcttggcattgctggtgatgagtgtgtatccctttgtcctgaagaggggcattgtgaagaagtccaacggaacggtgattgcattcgtcgggctgatcttcctcgcccgtgggtttgtggatctcggaaacaggatcaccgagatctatcatgccgtgttcgtctattttgatcttccaatcgctatcatcgcgttcgtgcttttagtcttcgtgataatcaacatactcatctcagccaagtctgtggaaaatgagttcaaggtaatcagccacagtactaacgaagagaacttttcctctcccaatgttcgacgggtgcatcactccagaaaacacaatgacttcaactatgctgaacgcgacataagtagacaaaattaccagaacatgaacaagcacaaacatggagataacgtacacgaggtgaagttcaaaaaagtcgtgaaacaggagtctgaccggagcaagtcatcgaatagtaaccaagaagccggcatcaatgagtcgagcggcaatattcagtttgaatccaatgacctcctcgacgattacaaatga

SEQ ID NO: 10232 - DNA, 885 bp, synthetic construct
  source 1..885: mol_type = other DNA
atgagtaaaaaagataagactctcaaggacatcctggacattatcttatacgacaacccgagcactcaagatgagatcgcggtaaagctgggaataacccgccggtacgtgacccaactcttgcagccacttgttaaggatggaacagtaaagagggcatacatgatcgatctgaaaagctatgagaaggtcgccgagtccctgagtgactatgccggctctaacgagacaaaggggaacgtgatagtcaacgacatgatcgcaaacatggccagacatgttcatagccagatcgaggtgtcctttgatgcggtgctcgagtacgacgaagagaaagctaataaagccctcgagatggattatgccacaaacaacatggtggagaagataaggacctccgtcgagacaatcgtgagtatgaataagcactcggagatctccaagtcaatgttgtacaatgaactggcttatgacctggagcgcattggtgactactgcggccacattgccaaatttgtcatcaatgacgtttacgaaatcgatgagaacgtgctaaagaaactgaaaaagatgtataagattgcccagaagatgattcggctggccattaccagctttattgaaggcaaaactgagcttaaggacgacctcatggaacttgaagagtccatccacatcctgcagaccaaagctattaatctaatagcagaacagatggctgaaaattcattcgacgagaaggagcgtagcaactacttcatttacctgttccgagtggtcaaagcattcgaacgcatgggggatatctctgtggaaatgatggatgtgtcaatcgaatttcacgagaatatccctaggagcacgacgcccagaaacttccggtga

SEQ ID NO: 10233 - DNA, 843 bp, synthetic construct
  source 1..843: mol_type = other DNA
ttgattaccaaagatactatcaaagacactgtctatgagctgtacaaacaggccgtgatcgtgctgggcgatgacgtaaagaaaagccttaaggacgctctgaaaatcgaggaacatgacctggcgcggcttaacattgaggctattttaaagaatatcgaacttgccaaggagaagcagattccgatgtgccaggataccggtttgcccgtcgttttcgtgcggctgggcaacgtcgaagtggagaacctccgagaagggattgaggaagggatcaagaaagccaccaaggagatcccaatcaggccaaacattgttgaccctctgacccgcgaaaacacgaacgtgaacgtcggcgactacatacctccaatcgacatcgagctgatcgacgaggactacctcgagataacgatattgcctaagggcttcggtagtgagaataacaacgctctcaaaatggcactccccgccgagggaatcgagggcattaaagaatttgtcgtggaatcagtgctgaaggctaagggaaaaccctgccccccaacagtggtaggggttggaatcgggggaactagcgacctgtgtctcaagctgggtaagaaagcgctgctgggcgaagtgggggtgagaaaccccaatccccagatcgccaagctagaacaagagatcctcgatgagatcaataattccggaattggcccgatgggactaggtggcaagacaacctgcttagatgtcaaaatactcaaggcacacacgcacacagccggcctgcctattggggtgtgtatccagtgctgggcagataggcacgccaccacaaagatatatgataattga

SEQ ID NO: 10234 - DNA, 246 bp, synthetic construct
  source 1..246: mol_type = other DNA
atgaggatcatgtactccggaaactgtacaaactgtacgacctgtggtagctgccagcaaacacagaacgtagacactcctatcctgttctgcatgcactgccagccgagcgatgcgccctgtctgaaagtctgcaaggagaatgcaatcgaagtgctcggcggcgccataaccatcaatggggaaaagtgcaacaaatgccgggactgtgtggaggtctgcccaattaatgtgataaagatttga

SEQ ID NO: 10235 - DNA, 501 bp, synthetic construct
  source 1..501: mol_type = other DNA
gtggaaagtatcctagtaaatagcgacctctgtgacggatgcatgaactgcgaaaacatgtgtgcatcagtccacaacgcgtcgaggataaaaattattgagcacgatagcagcttttattccattgtgtgccaacattgcgagaatgctccgtgtataaagatctgcccaacggaagcggtcacagaagagggggtggataccgaaaagtgtattggctgtggactgtgcgtgatgatctgccccttcggggcaatgaccttccagtccaaggttgccgagaagtgtgacctgtgcgctgaccgcgaggagggccctgcctgcatcaaatcctgtactaagcgagccatcagcatcgccgaccccgagaaaattcggtcaaagaaccagcagaagtacctcgctaaaatggccgggatctacgagccagatagtaaaaagggcggctttgtccacgtgatcacaggtcaggcccgggcaagactggtgttcgatgagtga

SEQ ID NO: 10236 - DNA, 867 bp, synthetic construct
  source 1..867: mol_type = other DNA
atggacatacctgacaaggacctgttggccccgggacacaggggctgcgctggttgcggagcctcgattgctgtgaagctggctcttaatgccctgggcaagaacaccgtcgcgatttccgctacagggtgtcttgaggtcatgaccaccccatacccagagacgtcatgggaggtcccctttatccacgttgcattcgaaaactccggagcagtggcctctggtgttgagagtgctctcagaatccagggaaaagacgatgtgaacgtggtcgcgttcgggggggacggcggcacagtggatataggtctgcagtcactgtctggcgctatggagaggggccataacatgctctacatctgctatgataatgaggcctacatgaacacgggcatccagcggtccggcgcgacaccctatggtgccagcacaacgacttccccgaaaggaagtgcaagcttcggggaggacaaaccaaagaaaaatatgccaatgattatggccgcccacggcatcccctacgtagccaccgccagtattgcatatcctgaggactatgtgaagaaggtcaaaaaggcagctgaaactaaaggccctgcgtacatccacctgcagcagccctgcactaccgggtggggctatgccagcgaaaagaccatcgagatgggacgattggccgtggagaccggaagctggattctgtacgaaattgagaacggggactttgagatcacataccgccctgaagaacggaaacccgtgaaagattacataagcgtacagaagcgcttcaagcacctagatgaagaacaaatcaataagatccaaaagtacgtggatgcacattgtaaggagctcgggttatga

SEQ ID NO: 10237 - DNA, 1146 bp, synthetic construct
  source 1..1146: mol_type = other DNA
atgataaaggaggtcatgaccgcaaacaaggcagttgccgaagcggtaaggttggccaaaccccaggtgatccccgtgtacccaatcacgccgcagactaccatttctgaatacctggcacaatacgtggcagatgagaaaatcgacgccaagtatattaaggtggagtcagagcactccgcaataagtgctgccgtgggagctagcggggccggagtccgtgtctttaccgccacctcttcccaaggcttgatgcttatgcacgagatcctgtttgcagccgcagggatgcgcgtgcctatcgtgctggccgatgcgaatcgggccatctcggccccgctgaatatatggaacgatcagcaggatagcatcgctcagagggatgcgggctggctgcagatctatgtggagaacgctcaggaggctctggactccactttgatggcctataaaattagtgaaaattccaacgtactgctaccaagcatggtctgcttagacggattcattctgactcacacagtcgagcctgtcgagattcctgaccaagaaagcgtggataagttcctacccccatacgtgcccgagcatgctttcctcgatccaaatgagcccatgacaatcgggagtttcgccgacaccaactattacattgaggctagacatgacatggagattgccatgaacaacagcatagaagtgattaaaaagacgtgtgacgaatttgccgaaatattcggaaggaagtacggtcttgtggacccatacaaaaccgaagacgcagacatcatttttgtggccatgggttcactctgcagcacagtgcgcgtcatcgtggaccagctgcgagaaaatggggaaaaagtcggtctcctgaaaatccgggcctaccggcccttccctgtggaggagatcaaggaggttataaaggactgcgaaaagcttgctgttattgataaaaacttcaccttcggcattggcggagctctctatgcggacatgaaggttaaaattgataaggagatctatggctttatcgcggggctgggcggcagagacatcacgcccgacagcatcatggagatctacgaaaagacaaaggagcctgtacaggatgttacatggatcggcctcaaggaggaatga

SEQ ID NO: 10238 - DNA, 243 bp, synthetic construct
  source 1..243: mol_type = other DNA
atggtaagcatcggttgcgtcatcaaaaccccaggcaatagtaagatcaacaaaacggggagctggcggacatttaaacccatcctggacaaagagaagtgtattgactgcgacaactgcatcatattctgtcctgactcctcagtgaacaagcagcatgatatagattatgattactgcaagggctgtggaatttgtgcccacgagtgcccgtctgacgcaattgaaatggtgaaggaatga

SEQ ID NO: 10239 - DNA, 558 bp, synthetic construct
  source 1..558: mol_type = other DNA
atgattatacacgataagtgcatggaggaaaaactgatgatcgaaattcgctttcacggaaggggtggccaaggggccgttactgccgcggagcttctagccaaggcagcattcaaggacggcaagtactcacaggcttttccgtttttcggggtggaacggcgaggagcccctgtgatggccttcacaaggattgataccgagccaatagccctccggtaccagatctacaatcccgaccatgtattagtcctcgatgacggcctgttgaacgttgtcgacgtgttcagcggcatcaaagacactaccgaggtgatcatcaatacaaagacgttcgaagggagcggggagcacaccgtgaatagcatcgacgcaacgggcgtcgcccttgacatgctgggacgcaacatcgtaaacactattattctgggatattttgcgaagaaaacccagatcgtcagtatagagtccctgctggaggtgatcagagagacattccccggtaaagtgggggagctcaacgtggaagctaccaaaaaggcttatgatatgggctga

SEQ ID NO: 10240 - DNA, 1605 bp, synthetic construct
  source 1..1605: mol_type = other DNA
atgaaagtgctgattatcaccggggagctagcctaccctctgataaaagaggtagtgtcaaattccaaagaggatataatcgtccacatcgccgacaacacccaagttgccgcatttctgactcccaaacagatcatcaaggaggtaaagacttgtttttccaaccagttggatgagattgatatgatcctggtcccaggcctgatcaaaaaaggaacaaaagagataaccaaggagcttggcatccctacatttaaaggatcgaccgatggggcggaccttgccatggttttaaatctcgtgggtaccatcgagctctcggaagacaaacccgcagacaagttgatcgatgaggagaagagaaaaaaagccttcaagttcatcgacgagtttgaaaatgacaaggaaaacattgagaaacttctaaagaagccaaataacattctgatcaagaaccttccagtgggggaagatttccctatgcgggtcttgtctgagattgccaatgcaccctttctgtccaaagaagctttgattaataagtgccagtactttgtggattcaggagccgatatgatcgatatagggatggctgcaggtgaagatttctcagacaagatccccgaactgatcgacacactgcgccccattgtcggaggcaggccactgagcattgacaccctgaacaccaacgaaatcaaggtggcagctgagaacggtattgatcttgtcttaagcttggatctgggcaacaacagcgaggtgaaggagattctcaaggaaaagaacatccctgctgttctgctccccaccaacttctcccagggtaagagccccaagtctccggccgagcgcgtggaagccatgaaccagctgatcaaggacacggaaggcctcaaatatgtggctgacctgatccttgacccggtcaacagtagcagcattgttgaatccataatcgcgtgcaatgaatttcacaagacaaatcctgcccccatgttcttcggggtgggcaacgttactgagctcatggatgcggactctggcggagtgaacgtgctcctcgccggaattggtatggagctgggcgtaagcatattgttcacccccgaagagagtgggaagacacgaggcagtgtgtacgaactcgctaccgcatctaaaatgatgttcctcgccaagcataggaagtccattccaaaagacctggggattaacctggtggcattcaaggacaaacacaagagaaacgacatcatattaaatgagagggacggcatcccagagacgatgcaagagaagcctatgaaattcatccgggacaaggctggcagtttcaagatcaatgtggactacggaacgacggtgaagcacagcaagattactgccacccacttcaagaagaacaagccggatatagtcattgtcgggcataatgcgcgggaaatctatgaggagatcatcacaaaggagctggtcacacgtatggagcatgccgcctatctaggctcagaactgcagaaagctgagatcgctatgattactggaaaggagtacgtgcaggactttgacctgttcaaaaatcctgatgaatttaaaaaatga

SEQ ID NO: 10241 - DNA, 405 bp, synthetic construct
  source 1..405: mol_type = other DNA
atgaaggctgataatgccatcataatcgtactggtcgtgctcatcatactgtgcggagccgttgccctagtgattacaaacaatggcatttcatttaacaatacaagcgacagcgtggtgaacaatacaaccaacaccaccaacatcacggccaacgatactgacgagacgggggcgactcatgacaccggcctggtcgcttcctcgagcgatgacggttccagttacagttccagcggatatagcagcagttcaggcagcaacagcggttctagttccgggcaccaaagcgacaactctcagtcgagcagcggctccgaatccagttcaggatcagaatccaattcggagcccgagtctgatagtgcagggcagtccgaaggctcatccgcagacttcgagtga

SEQ ID NO: 10242 - DNA, 855 bp, synthetic construct
  source 1..855: mol_type = other DNA
ttgcaagcggaaaatatcagtattaaggacattgataagagtcttttggacagcaactacgtgtcgaacaatgaaattagcacgactctttatttatcactgctgctgggcaaaccgatgctgatagaaggaccccccggcgtggggaagacagagctagccaaagtagtggcaaaaacattcaatcgggacttcttccgcatccagtgctacgaaggcatcacctttgagcagattgtgggcgagtggaactatcagaaacaactgctccacctcgaggccgcccgaaacgactccgtgcgggaagacaaaatctttgatgaggagttcttcataagaaggcctctcctaaacgcctttcttaatgacaacgattccgtactcttgatcgacgagatcgacaaagctgatgaggaagtcgagagtttcctcctccaggcactgggagagcaagaaatcaccatcaacgacctgggtaccttccagctgaacaatgatctgatagtcattttaacatccaactctcagaggagcctgcttgatgagaccaaggacagatgtttgtttctgtacattccatatcccagcattgagcgtgagatcgaaatcgttaagagcaagctgcataacgccgatgacgaaacggtctcatacgtggtgaagctagtgcacgacatacggaacctcaacctgatgaaaaagccatctgttcgcggaactgtggattgggtgcagtcagttatgaatctcgggactaaaaatctggaccagtccctgaaggactccgtcggggtcgctatcaaaaccgagagcgataagaagagggtgctgaaggatatctttaataagcgctga

SEQ ID NO: 10243 - DNA, 1155 bp, synthetic construct
  source 1..1155: mol_type = other DNA
atgttaacaaagatagcaaccctgtccgcccagctgcgagagaaagatctgcccgtcagtgtgaggagtacgcaggccgccgtgcaaatatataagaacctcggggaaagcgacaggaacctactaaagaccgcgttaatggccatctacgtgaaggatcggtatgacattccgaaattcaacaagatcttcgacgaagtattcacggtgaataaaaaggttgaaatgcctgaacagcttcagaagtccaaggcatacgaggggaccggccctaaatccaacaagtacgtcatcaagaagcaaggcagcatggccagtaaagttcagaaggagaagatcaccaacgagaagcttaaaatgctttccggccagccgcttctcgacgaggcgaagaagctcgagcgggacggggagctgatgaacaaggatctcacaaagctgaaccgttttgatccccgcatgctggagatttgccaaaggctcggcaaaagaattgctaacaaacggagccgaagaaagacgaagacaaccagcaataagatcgacatccgccgcaccataagagcgaacctgaaatatggtggagtgcccttcgagctggtaaaagccaagccaagacctcacaaaaacgagcatttgttcttgaatgacatcagcgggtcatgcgaatggattagcagctggtttttcatgctgatgttttcagcccagacagcattcaagcgatcacgcacattcgaatttgacaacaaggtcatcgagactaccgatgctctgaaagaagagtacctgatcgactcattcgtcaaagtgaaagatctgcgggtgaagaatctgatggttcacggtactagcgatatgtactcctcgtttaagagctttcaggaacaagctaatattaataacaaaagctacgtgatcatcctcagcgactgccgggactgggccggaccaaaggtgaatggcattccagctagtgtggaaatcgtggaggagatggtcaaagattcgaagaaactgataattctcaatcccgaagacaagaacaaatgggacgtggtggacagctgtgtatccttgtatagggatgctggagcacagatctttgaggttaatactttgaaccagctggcccagttcgtcgagcagatgtga

SEQ ID NO: 10244 - DNA, 918 bp, synthetic construct
  source 1..918: mol_type = other DNA
atgcaatgctccaagtgtgggaacccgaaggtgatcattaagaaggaacagtctggccagctgctgtgcaaggactgtttcattgaaagcattgagaagaaggccataaagactattcgtaaagagaaactgctggacaagggggataaagtgctggtagcactgtctggcggcaaggatagtgtcaccacgcttgaaatattgaatacattccgccaaatgcacatcatcgagctttgcgccgtgacagtggacgagggaatcgacaattataggcaggacggcgtggatatcgctattaggcacgccgagcgcctggggattgagcacaaggtcgtgtccctgaaagatgagtacgggatcaccctcgacgaaataatgcagaaagagaaccataaagggtcctgtacatactgcggtgtcttcagacgcacgatcatcaacaaagcagctcgagaaatgggtgccacaaaaatagcgaccggccataacctcgacgatgaagtgcagggaatcctaatgaactaccttgagggaaacatcgataatttgactaaactcggcgcaaagtcagaatcgaaggccgaggagtttaccgtgaagatcaagcctctccgggagattcccgagcgggagatcggcctgtacgtggtcgccaaagaattggaggttcacttcgacagttgcccatatgcgatgcagagctttagaggtgaaatcagcgaggttattaaccatttagctgaaaaacaccccaccatcaaatacagcactctccggggatatgacaagattaaaaatgtactgaagaaggaactgaagaaggaatttaatcacggcaggtgttcaaaatgcggggagccagcagctaacgagctatgcaaggcctgtagcttcctggaggagctcggaatgtga

SEQ ID NO: 10245 - DNA, 204 bp, synthetic construct
  source 1..204: mol_type = other DNA
ctccagttcatactaaagtataaaagcattaatgagaaacgggtcttgcccaacgacaattacacaattaaggatctgctcgacgagctgcagctttccgcccagaccatcgtgagcaagcaaaacggcgaactggtaatcgaggatacggtgattgaaaacggagacgagatccagctggtgcagatcatctacgggggctga

SEQ ID NO: 10246 - DNA, 864 bp, synthetic construct
  source 1..864: mol_type = other DNA
ctggatatcagttacgagtgtgggccttgttttctcagacaggcccgggaggccttagacttgagcaccgatgacgaaaaccttaagatggaggtcatgggggagatcttcaagttcctgtccgtgaccttcagggaaggtacaaatagtaacagcaccggttcttcaatgcacaacatcatcaaacagaagactgggtgcatggacccatactataaagaaaaggttgagggcaacgagatcgctattaaatacctgcccgaggtgaagaagatcctgacggaagatgactcgttggagaattatgtgaaaatagcgattatcggcaacatcctagactttggcgcgttcacactagacgacgatattgagtccgtaattaagaacagccttaaaaaagatctggccgtgaaggacattgaggaatttgaaaattctctcaagacacacgacaaagtgctgtacttagtggacaacactggcgagattgtcttcgacaagctcctgctcagtaagatcaaggagtacgatctgaatattaccatcgcagtcaaatcagagccgattctgaacgacgctacaatggtggaagcattggaggtgggactcgatgaatttggagagctggtcgacataggggctggaactgttggctatgtggattccgagatcagcgacgaatttcgacagatcttcgattcccatgagtttataatcagcaaggggatgggcaactatgaaggactgacggaaatagatctctctgacaaagatatttacttcctgctgtgcgtaaagtgcaataccatcgcccgccacatcggcgccaatctccatgacatgctgcttttcaaaaagcaatga

SEQ ID NO: 10247 - DNA, 735 bp, synthetic construct
  source 1..735: mol_type = other DNA
atgatcatcggtctgattggctttggaaatgtgtcaaaaaatctcgtaaagctcatcaagtcagacgacattacattcatcacttcgatggaagaccgatctccgaagaccattgacgcgattgagaaatccaaaattaaggtcctggatacctttaaggatgtggccgttgcctgcgatattctcattagcgccaatagcccaaaatcggccctcgaggctgccgagaactacggcaagttcacaaagggcatctacctggacctgaacaacattagccctgacactacgtttaagataaaccagcacgtggagaacctggtggatggggccatcatcggcaagatcgacagccccaatccctacctgtacatctctggagagaaagcagaagaacttctgttcctcaatggattcttgcagaccaagaaaatcagtgacaacgtcggggatgtcgcgatcctcaaattgctgagaagcagttataccaagacattgagcgctattctgatcgagtccactgagctatccagggagtatgaccttgaagaagagttctttgacatcctgtcactaacggaaggggataacttccgcgagaaatctatctccaggataaacaataccttaaacaactccaagcggaagagcgaagagatcgaagagataataaattatttcaataagaacaaccttagtatggtgcgggcagcactgaaaaagctgaaccaatga

SEQ ID NO: 10248 - DNA, 1269 bp, synthetic construct
  source 1..1269: mol_type = other DNA
gtgctgatattgatcggaattagtgcagattttgaccctgttcataaaggccacgaaaagctcatcaaagaggccaggaaactggctgacaatgagaacaagaaagtggttgtgtacctgaataagggattcagtgctaatcacgctcctttcttcgtgaacttcgaggcgcgtcgcgacatggccttggctctgggggtggacgaggtgaagagctttgaagggctgcaccaccgactggtgctgtcttacagtgtgcccatcaggctcaagcaaatgattgatgacggaatcacggattacattacctccgccagcatctcacttgatgagattaaatcaaaggcccaaaagttcatcgatgagggcaacttcgttggcatgccaaagagttacactaacaggaacgaaatccggtggtatgctataaatcagttcctcgggagcaagcttaactatcacgtcgtaaaagaatttaacaaagacaaatattccgggcgcctcattcgccagtccattatcgataacggaatggtcatcacggacgacgtgaagaagttactccccaagacaacgatcgagattcttcagcatgaaatcgacgccgaccgcatccctgagaaccgaaattgggtcgagatctacaagaagatgaacacctattccaggggcaacctggaaaagatcgcgtaccttaacggaaacaccataaacgagattatcaaacggcgcgtctaccgagacccggaatccatttgggccgtgtttcggagatctaattacggtcccgtcatgacccggctggcaatctcgtcaatcgagatgggcgtgaccaaaaaggaggtcatggatctgatgaaaggttatgaaagccagggcgtgatcccagataaccagaaagtccagcgggtcattgacagagcatggtatgtggccactagcaggctcgacgcacgtgaagccaatgagaagttcagaaatgagaagatcgaggttaattctcccctctgcctggaggccggcctaaacctgactaaatttgagaccaagataaccaaggaggggctaaaaacagatttgtacgtagataagaatggtaagataagcgtgcagttcaaatccgaaggcaaaaagatcaagacaaatttaagactgccagcggaagaagttacatatctgagatacatcatggacagccattttattccggtgaacggacacataaagaagtcggagaaaggcttcaaagtgaaggtaattattgggtga

SEQ ID NO: 10249 - DNA, 483 bp, synthetic construct
  source 1..483: mol_type = other DNA
atgaaaacgaagtttgttagcctactgtccatactcctcggcctaatcatcgtcatcttcccaatcatgggcgtcattggcgtgggttccttgattggcttgtccgcacttttaatgtctatttatttgctgatcgtgggaatcgcgataatcgattataacaatagcggggccatcctggaccttgtgctgggcctgattctcctcttcctgagtatctgcctgattttcaatccctcgcttctgggatttcttaccgagatctcaatgtacttcgccggcataatgttaatcattgtggctgtagtcagcctgatcaataaccgcaacagcaggtacggattttatagcggcatcattgggatcatactggggctgctctacatcattatcggaacctacctctcaaacccgattattctggggacactcatcggtatatggctggtgatcagtgggattttgaagctgatggaccggtga

SEQ ID NO: 10250 - DNA, 1083 bp, synthetic construct
  source 1..1083: mol_type = other DNA
atggagattgaaaatctgaccaaggacatcagagccagagcctttgagaagaaagatccgaaaactcccgagcaggtgggagcaagttggtataatgacgatttaacttatgaggggattagcaaaacgctcttcatgatcttgccaacccccggatgcagctgggcacttggcgatagtggtggctgcacaatgtgcagctacgtgtctgattgtaccctggagccaatcgatacggagactattcttcgcatctttaacgaccatctttcgcgacaccccatcaatgaggaggacaagatctcggtgaagctgttcgccagcggctccttcctaaacccctacgagctccccaaggatgcacgtgacgagatcctgaaaaccttggtcaacctgggcaacgtgacagaaatcattgtcgagtctaggcccgagtatgtgaaggaggaatacctggacgaaatattcgagatcatcggagatactctgtttgaggtcagtattggcctggaaaccagcaatgactacacccgcctcaagaagataaacaaaggttttacccgggacgacttcgaaaatgctaccaagctcatgcagcaccaaaggaagacaaaggggtacaatttgaagacaaaggcctacatcttcgtaaagccgatcctcgtttccgagaaacaggcgatcacagaggccatagaaaccgccgagtactgcgactccattaacgtggaccgcctgagcttctgtcctgccacaatccatgggggaacggtcatcgagaggttatggagaaaaggggcttaccaaccaccttggatttggtcctgcgttgaaattataaacactgtacgggatgaactgagcattcctgcgctgctggacacctcaggctttggctcccgacgggggccatacaactgcaagaaatgcaataaagacctcaaacagatcatcatagctaacaatctcacacagaacaagattgaatatgaatgtgaatgtaagaacgagtggctagctgaaattaacaattcagatatgaacaactcaacggtgaaagtgaagcacatccctctgtattga

SEQ ID NO: 10251 - DNA, 960 bp, synthetic construct
  source 1..960: mol_type = other DNA
atgaagttcgggatagagtttgtgccaaatcagcccctggacgagattgtcaagttagtgaaactggccgaagatgtgggctttgagtatgcctggatcactgaccactacaacaacaaaaatgtctacgagaccctcgcactgcttgccgcgaacacagaaaccatcaaaatgggtccgggggtgaccaacccatatgtgcggagccccgccatcgccgcgagcgctatcgcaaccatagacgaaatctcggagggaagggcaaccttcggcatcggtcctggggacaaggctactttcgacgccctgggcattgagtggactaagcccgtgagtacaatcaaagcagccattgcggacataaacacgttgctcgccggggacaagacagaagggggagcagcactagggggcgtgaaggccgtccaggaacacattcccatctacatgggggcccagggacctaaaatgctggaaacagcgggcgagatcgccgatggagtgctgatcaatgctagcaacccaaaagattacgaagccgctatgccaatgatcaagaagggcattgaggccgcgggcgataaggagtttgacgtgggcgcttacaccgcaacatcaatcggacctgacagcgatgccgctaagaatgctgcgaagattgtggttgccttcattgccgctggatcacctccacaagttatcgaacgccatggattgccggaaggattcaacgagaaaatgggcggattcctcgctaagggtgactttggtggcgctatcggtgccgtcacggatgaggcactcgatgccttctccgtctgcgggacgcccgatgaatttattcccaaaatagagggcctggctgagatgggcgtgacccagtatgtcgccggttcccctgttgggaaaaatgtagaggagtccatcaagcttctgggcgacgtaattgcaagtttctga

SEQ ID NO: 10252 - protein, 64 aa, Methanobrevibacter gottschalkii
MTVPETSEILASFGFKNLNKQVFTFKIIFISMLFGLDIPFILSELESKEKLRKYFNISEVWSAD

SEQ ID NO: 10253 - protein, 82 aa, Methanobrevibacter gottschalkii
MGDKLLIMYKQNNCLPFLILEDKTYNFVGDFVDPIRHENKCEILDNSVQIILPIQSILDNNFFVNSDGVIEYRERHCCKCGS

SEQ ID NO: 10254 - protein, 350 aa, Methanobrevibacter gottschalkii
MYSIKSVKEIQDLNPFIVVGCGGGGEKFSNLEGVETVGFIDDNVKKQGKEFCGYIVAGSLDESLKHAKNAKSLVIMLPIGAEGSALKYAVQAIDAGLNVITSFRSLSITENISLKKFADAKGVVIKDIGPRLDVVKTIAGVAPKKSCEVLPKISYESKAPVIFVGGTSQECGKRTTTKKLGIASMKRGLTPAIISTDEMGLEEPTDFNFRAGSLSAMDVPAAVLSAIKYAEETKQPDIIFIEGQSSLTEKGNPHPRGLSAAILIGAAPDAVIVGHRPNHPYREPRGIEEEIRAIEAVEPTKVVGLSINLKNADLDLCPEFFESKYNLPAEDVYNNGADKLLDAIFEYLGE

SEQ ID NO: 10255 - protein, 177 aa, Methanobrevibacter gottschalkii
MSFMDNLKRSLGYEETEDSEKKEGGSFNFSEFVNDFTKSVKNSREQYKQSKQQETAQQQYRPAPEPQQAHRTAPVYDDFDDDFVITPEQSFYEIVLIRPKTLDDINYMVDQILEEKNPIIVDLSFLEKESEANFKLAGDKIRQMRTKYGAQALLLTRSEDKNLIILSPRKVKLVNKG

SEQ ID NO: 10256 - protein, 304 aa, Methanobrevibacter gottschalkii
MLIKKIPIPIAGLALALLSLGNLLQDMNPNVKYLFGAMGAIIIVLTILKAIFYPEDVKDDFKNPVIASSSGTFSMSLMLSSTYALEFMPNISYIVWIIGISLHILLMIYFTYHFIIRNFNITDVYPSYWIVYVGVSMAAITAPLHGHKEIGFIFLVISFISMLITLPLMIYRYVKYSEMPDANKPTTCIFTALMSILLVGYINSAPAISTAFIICLYCIACLFYIFSFYKLVEYRTLKFYPSFAAFTFPFVISALATKDIVKIVGSNTLLSSVQTVETLIAVIVVFYVLFEYCEFLKNSKKSRN

SEQ ID NO: 10257 - protein, 251 aa, Methanobrevibacter gottschalkii
MIDTHIHADARSSEDFKEMYLSGIDCAITCSYYPYKIDAENILLNHLNRILEYDTLRASQYGLDLKVALGIHPTNSIENPQMIFDEMYNWIENKQIVAIGEIGLEDLTETEIDIFKKQLDIADETNSKVIIHTPRKKKLEVLKVILDIVPQHLDESQAVIDHVNQEVIGEVIDRNYMLGITVQPQKLDVDGAIDILDNFGFDNFLLNSDMSNKPSDHLSVAKTIRELSRLGYKKSSIDKISHRNASDYFKI

SEQ ID NO: 10258 - protein, 299 aa, Methanobrevibacter gottschalkii
MFLIVGSLYAVSLFHIFSLQEILYFLVIKNNDVSNTRLVINLENNENYLKSYDLISEEVKYLTNSIIRLKILATLFKCPLNMKDINGITSLSYSSISSNLHNLELKGHVYREHNKYFLSNSTKLEVEQVLKLGNLINLLNDFFNILDKHLVDMIPNQSVAELYLLGNACLMESDGVDVYRIYKYIEDALNAAEEVKCVLPFYYETFNDKLNDLVKNDKKVEAMVPLSLFEVFDEKSEIGKLSFFSNDKTFLLIITHELMILGLFKEDGYFDQNRLLTSKNSDSIKWANNLYENFKIKNK

SEQ ID NO: 10259 - protein, 564 aa, Methanobrevibacter gottschalkii
MNHDKMSNISSKRGFLWPSFEIYSGVSGFTDYGPLGASLKNNIMQKWRKQYVSGEGFYEIEGPTVMPKEVLKASGHVDNFTDPMCKCEDCGEVFRADHIIEEVIGEDVESLENEELDQIVIDNNIKCPECGGNLSNIWNYNLMFKTEIGAKGDKIGYMRPETAQGIFILFKRLERFFRGKLPFGAVQLGKAYRNEISPRQGVIRLREFTQAEAEIFLNPKEKTHPKFSQIENVILRLNSQEVQEKNLEPLEITAREALDKGIVANEMLIYQLYLARKFLTEIGIPEDVLRFRQHLKGEMAHYALDCWDVEVKTDKYGWVEIIGIADRGDYDLSSHSKYSNDELNVFIEYDKPKKVQKTIVKPNLSKFGPIFKGDSPKVKQAIEDANVEDIKSAIKSEGKFTVELDKVYEVPEDLLIFEDVEEEITGEKIIPHVIEPSFGIDRITYSVLLHSFTETEGKDYFRFDKSVAPVQLGIFPLVNKEGPREIAQELTEQFRMNGFKVEYDATGTIGKRYARADEIGIPIAVTVDFDTLDDNQVTVRDRDSEAQERIPIAELADYVEKYYK

SEQ ID NO: 10260 - protein, 194 aa, Methanobrevibacter gottschalkii
MAILSDKDIKKYLEEGKIGIEPLLDEKQIQPSSVDMRLGDEFKVFKVIRKPYIDPKDEEDIASYMESTTVNEGEAFIIHPNEFALATTLEYVKVPDDLVARVEGRSSMGRLGVTMHVTAGFIDPGFEGKITLEISNIGAMPVALYPGQRVCQIVFETMTTPSEVPYGHPDRQSKYMGQTSPESSRVKLDYELKK

SEQ ID NO: 10261 - protein, 276 aa, Methanobrevibacter gottschalkii
MRRIRFVDISIFVLKYIFNWRFWIAEITKKSKIYKKFIDKMLFEEDEIVVVPNTVNINKKIESEGSEFLPTDIIKEVVKRSEDIVIMNTCLCRESNDCQDYPHDIGCIFLGPTTRKIPNHIGKKATVDEALAQIDKADEAGLTHIIGRNKIDTIWMNIRPGKGLLTICHCCPCCCLWKVYPNLDEDISDKIEKLNGVEIKLHEDNCKHCMKCLDDICMYGSISLENNKITIDYDTCKGCGLCVNACKFDAITIDYTAKTIDNIVNRIDDLIEIKEL

SEQ ID NO: 10262 - protein, 302 aa, Methanobrevibacter gottschalkii
MIKIGDTAVSEEKVVETTSLNSPKEKEKSDDEKKSTSTKKAKSTSQSRGTARAKLIKKQEKKEISLFKENIYIVFVECETPGNIGFLARTMANFGLKNLVLINPPTLTNEAYYQATHGKYIVENAKIYPTLDDFYQSQRIDFKVASTGMAGGSYNLSRIPIRPEELGRSMNVSNKIAILFGREGNGLTNKEIEDCDICVSIPTDPTYPIMNISHAAAIIFYELFRNKHDYGAEGLDESSDLEKEFLLMDMKEIINSLDIPDHKKRNGLKTFNNIISRAFITSREAHTFKGILRRMKNKFGEQ

SEQ ID NO: 10263 - protein, 491 aa, Methanobrevibacter gottschalkii
MIKVYVSRFNRGIDTEPHLECYDINETPNMKVLDALQAINEKYDADISFRSSCRAGQCGSCGILFNGNGALACQKEIKDGAIIEPLKFPVIKDLIVDTSSIEAKVKDLELSLQCSHECSELDSSITKKDTADTKKVRNCIECYSCYSTCPVVNIATEEFGGPYLMRYINKFDTDPRDNFDRLKEALDEGLYNCTSCGKCLSVCPKNINTFGDAIEKMRAIAVANGSGPLPKHVAFKENILKTGRSVKTDKPTFIEETKNKTGSKIAFFTGCMVDYKFPEVGHKLVKILKENGIDIDVPEGQVCCGSPLLRTGQTDIVQDLVDKNKEVFKDYDTIITVCSGCGATLKNNHPEFGSKLNVMDISEFLVDKLDESKLKDVNMTVTYHDPCHLARSQGIKDAPREIIEKIPGVEFKEMLYPCQCCGAGGGIKSGKPEIAMELAKSKAEMVKDTGADAVVTICPFCELNIQDGLNEIGYDNIKCIHILELLDKAYE

SEQ ID NO: 10264 - protein, 259 aa, Methanobrevibacter gottschalkii
MKIKAVKLFENGFMTQPFAFGGEKGAENFDASVKYRSSLQNYVIDTGDEVILVDTGLPSELPEQPRDDNAPIWSGDKIKDYVPALKEAGYDIEDITKILVTHKHLDHTGELKKFPNAEIFMSKTEAGEVDLESDNIIGVDFDDGEYYNFKKSQKIANGVYLIEAKGHTLGNSMVIVECDDVFYMLHGDITYTDEALYENKLSIVFEDIGAARETLDNVREFIKNNKTVYLSTHTPLGYENLENNKIIDLENPPESIYPN

SEQ ID NO: 10265 - protein, 628 aa, Methanobrevibacter gottschalkii
MNLKELVTGDSGEKRFLLGNEAAVRGLIEAGISIAATYPGTPSSEIGNVLSVLAKDANIYFEFSTNEKVAMEVAATAAVSGLRSFTFMKHVGMNVAADSFMTTAYSGVNGGMVILSADDPSLFSSQNEQDTRNYAKLANVPILEPSNCQEVKDMVKYAFDLSEQFKLPVIVRTTTRVSHMRGVVEFGDVRDNSSNNDNHWKRGHFNKDPSKYVPVPAFAGDMHVRLWDKIRKIEEVSNKSKFNCEWGTGKKYGLIASSSAFNYACDVVKFNNLDIKILKLGFSYPFPQNKVIEFLSDLDEVFVVEEVDPIIERDTLVCIGSKNLNVQVHGKLDGTFPIYHEFNSDIVAEGLNKVLNFKENKSVQFTQSLEKLSEDIPSRAPVLCAGCPHRAMYYGINIAIEELGLKPEDVIFASDIGCYTLGINPPYNAADYLLSMGSSVGDGCGFSVSTDQKVASFIGDSTFFHSGISPLINAVHNKHNFVLTVLDNRITAMTGGQPNPGIPVDGMGDDAPEVSIRKLALACGCDFVRVINPFNLEQVVKTYREAFERKDAAVIISKAPCTLIKGLTRKPPVKFIESNCNNCDKCVKELACPAISKINGKITIDESQCDGCTACIQVCKYGALEDGR

SEQ ID NO: 10266 - protein, 215 aa, Methanobrevibacter gottschalkii
MDVQHVFRYVNMVPWKMVGEKMDNHYNIYICGVGGQGIIKTSTIIGEAAMNQGLDVVMSEIHGMSQRGGSVSTELKIGGYNSSIIPKQGADMLLSFEPVETIRGLDKVNSETKIVYNTHPIIPSSTDKQYPNVDSITKTLKENFKYVLPIDGTQLAMDAGSVLALNMVLLGAVTADDKFPLTKESVIEAMKNNLKPKFHEMNLKAIESGYNSIKS

SEQ ID NO: 10267 - protein, 92 aa, Methanobrevibacter gottschalkii
MAYKIDNAIIKKDRNGKVTLIDPENVFGDEDAFIAVKSDDLITIQLLINAIMKNDFKSWKELGAIPETEPIKSLFVRLGYSREDIANMLKEF

SEQ ID NO: 10268 - protein, 143 aa, Methanobrevibacter gottschalkii
MAVKQISVFVENKEGRIKKAINTLAEENINIRALSIADTTKYGILRLIVSDNEKAIAALEKDGFIVKENEVILLAVPDKPNGLNSTLAIFDEKGINLEYLYAFVSSKTDAAIVVMRLENMEKAIEALQDSNVKILKTEDIKDL

SEQ ID NO: 10269 - protein, 434 aa, Methanobrevibacter gottschalkii
MFWDEKAECMSKEEKEKIQLKRLQKSVKLAYENVEFYKKRFDEIGLKPEDIKTLKDIEKIPFTTKSDLREAYPLGLLAVPREDIVEVHASSGTTGKPTVTAYTQNDLDIWGECIARGLKMAGAKKDYIIQNAYGYGLFTGGFGIHHGGNMMGTITIPISAGNTQRQLDTMVDFQSDILTCTPSYAAYIGESREKAGISLDEINLKAGIHGAEMWTDEMRKRIETSLGIKTHNIYGLTEVMGPGVAQECGEQNGMHIQDDHFYPEIIDPETGETLGYGEKGELVLTSLTKTGMPILRFRTKDLTSLIGEACDCGRTTVRMTRITGRSDDMLKIKGVMVFPSQIEKALLKIQGISHNYMIHVTRPDILDEVEVKVEASKELFFDEMKEMEKVEKQIQASIRSETGLRVDVTICEPESLPRSEGKAVRVIDERNFED

SEQ ID NO: 10270 - protein, 291 aa, Methanobrevibacter gottschalkii
MISIFHLFFKKTIYSSLILNLIGDILNFKFKECKTEFDGGNFEEALDILGEIENDDEDYKFALMLKYNCLMGLGCYGDALTIINMLIHENPYMSLFWFDKVKCHYFLKDLTNAAGALYHVEHIIDLKDVVEIIDFVKLCNMIGEHVIALKYCNIVLDTDENQIDALLEKSLISNIIDDKNMMNECGDKLFELSGDNLSLLMVSFALKLFSGMYRDSFNIILNINCMDSKMGLILKKIIYNQMLCDLNIQIVMESNAELTIDEFILLLFDYRYYGVESGEVKNVRYMIVKQD

SEQ ID NO: 10271 - protein, 536 aa, Methanobrevibacter gottschalkii
MNVMILAIVFIIYIFSLVFVGYYAYKKTNSSEDFMIAGKDTHPFIMAMSYGATFISTAAIVGFGGVASEYGMSVLWLAFLNIIIGVFIAFVFLGKRTRRMGHALNSLTFPEFLGKRFNSNFIHYFSGLVIFCAMPLYAAVVLIGAARFLESSLLIDFSIALLILSIIITFYVLFGGIRGVMYTDALQGSIMVVAMVFLLVFVYWLLGGIDIANTALTNMVNLYPANAIATGGTGWTAFPEFGTPFWWSLVSSTLIGVGIGVLAQPSLIVRFMTVKSDKELNRSVLIGGIFIAIMPTTAYIVGSLSNVYFYDKLGKIAVDVVGGNIDKVIPTFITMALPEWFVYIFLLSLIAAAMSTISSQLHTQGTAFGVDIYGTLRNKSKQKLDQVSISRVGILIAIISALVMAFSLPGSVVALGTSLFFEICAAAFLPVFLGALYWKGITRLGAISGIISGTLVSLFWLMFVFKKTALGLGICKFVFGVETLLPVAPWPFIDVMLIAVPISAIFTIVVSLLTKPLEQEVIDKAFENIDEKGSDA

SEQ ID NO: 10272 - protein, 37 aa, Methanobrevibacter gottschalkii
MMILGIEDPMIWGVYVGIILSTLLCVVYGIVNWNNGD

SEQ ID NO: 10273 - protein, 239 aa, Methanobrevibacter gottschalkii
MKELFSNFGRIQKNDPEFHEIFEKFAYGEVFEYSNLSEKESILVTLASLLACQSPKAFKKILLAALDMDLTAEEIKELLYQSVPYVGFARAHNFFGIVIKVFNKKGIELPLPNRSNTNPENRHKKGRELQDKYFGAEIIQMMNDNTPADQQHFNRFLEGFCFGDFYTRDGLNDQERELITFVFLASLGGCESQLMGHIQGNLNAGNDKEKLISALTVVMPYIGFPRTLNALSIVNESCE

SEQ ID NO: 10274 - protein, 144 aa, Methanobrevibacter gottschalkii
MNISNRSVKMSNIEKVDEILSKAEVFYLATVYGEKPKVRPLGFHLLIDGKIYFGVGTFKEVYKQIESNQNVEIAAWDGEHFLRYYGVADLTKNDAIVEKAFELMPEIAEMYEANGWEMGVFYLNDATAEIRNMMNVEETYEFKY

SEQ ID NO: 10275 - protein, 358 aa, Methanobrevibacter gottschalkii
MLIILIVLGVATHLFLTPSSVETEGSKNITDMLNRTVEVPNGVNNVIATSPPMTTVLYMLSPEKLKAVNFQWTEDELKYVPSEYANLPVVGGWYGTQDGSYEEFIAAEPDIVIESIDEGGDGDAFTVQERQDKFGKIPVLAVKDTTNVEKIGDSISFMGEVIGTEDKANQLNEFNTKYLDIVHDKSSKLVDSNKKTVYYAASSDGLQTYPSGASHGQLIDLIGGKNVADSLNQGNTTSGVQVSIEQVIKLDPDVIITNDMHFYNKVYNDSSWAHLKAVKNKKVYVSPQSPFKWFDKPVGANMIIGVPWTAKVIYPEDYKDINMVDVTKEFYSNFYHFDLNDNQAKEILLDSGLKESNL

SEQ ID NO: 10276 - protein, 337 aa, Methanobrevibacter gottschalkii
MDNDSKDVISIILLIFLPIILFFTSFLLGRYPISPIDVINTILCPIFPQLEVSPTITTIVFEIRLPRIIAAIVVGAALAMAGAAFQSIFKNPLVSPDLLGVSNGAGFGAALAILISGAGVVTQIFAFAFGIISVSVTYLISRAYKAGGILILVLSGVAISAFFSALISAIKFIADPDDKLPEIVYWLMGSLASITMDQLIMIIIPIIVGMIILLTLRWHMNLLAMGDEEAQSLGLNPTRVRLLIIAGCTLLTSAAVSVSGIIGWIGLVIPHMARMIVGPDNKILIPASLSFGASFLLLIDNISRAIISIEIPIGILTAIIGVPIFLYLLKRGYSEWA

SEQ ID NO: 10277 - protein, 267 aa, Methanobrevibacter gottschalkii
MGITNNFYEVKNISFSYDGNEIFSDISFSIEKGDVLCILGPNGTGKTTLIKCLNGLHEIGSGEILIKGKNIKKLSFKEISRNIGYIPQNHAPSFPFKVIDVVLMGRAPYLNLIDAPRKKDMGIALNSLKTLGIDNLKDKEYTNLSGGEMQLVFLARILCQQPDILILDEPTSHLDFGNQIKLLEIIDNLAASGLSIIMSSHFPDHAFLSSNKVAIMKDGCFIDFGSPNDVVTEENLKKAYSIDVKLIELENKRKVCVPLKTNFELSL

SEQ ID NO: 10278 - protein, 189 aa, Methanobrevibacter gottschalkii
MNEQDYDEQLAKAAKFHGHICGGIAIGTKLAMYGLELLGMEFNQKHKNLIVFLEIDRCMSDAVQSVTGCSMGKRTLKQMYYGKFAATFYNQDTGEALRITDADANKKFKDEETKEEMIDRFRRTLPEELFKVNKVKIELNPGDMPGKPYTTTFCSVCGEKVSDGRHILRGGKPICRSCAEGSYYELIED

SEQ ID NO: 10279 - protein, 686 aa, Methanobrevibacter gottschalkii
MRKCFVIILVLCLLFSLNICFAQDISNSTDFTFQNSNFDYLEKTDSVNLISTSDKISTHIDVVSNTTFDGTVDYFKIKLSDENNKSVPNAKVIFTVNGVSYDKNTDSQGISSLQINLADGSYKVISKFVGDSNYKSSSKSTTITIDNTRIVEDGLNNAEIQNIIDDAKEGNVILFKGNSYSNINLVINKRLTLISTVNTVLKSSSSSPTITIKGKEASYSIVKGFKIQGNGDGVVVDGSNYVRILNNDITADGVGITAFNVKYINITGNNIVKNGKCGIILYSTEKSYIINNVINNNNANGIVLTKSDITYIDSNTISNNARYGILLTNKFNGNSYKNGPENVYITKNTINNNKWDGISVNNAEDNINIKGNTIVGNDESGISVNVVGSYKIQSNIITNSYTGVRFDEDHVQKKNQEITYNAIYGNAHVQIEAKSYNGVNPLSVGDNWYTDDGLLCPKIKTNNLKFTVTQIGKNQFQATFVDSNGNIASLLPDRELKYKTNDGKIATVMIKGGIGTFTVTASDADIIKSTVDRTSRKNVYDSNSPTKTPQNGQSPTYDYPNIDYGGGQGNGNGQGGNANNGNGSSQKSSDDSGNSSNSKKMEPNSNPVNQANDVSQSYDTSQSMARADASEISGGANSGSQSIAKQIIIEDDEFFIVKGLSLIVLLILLTIGFYYRDDINEMRSKL

SEQ ID NO: 10280 - protein, 485 aa, Methanobrevibacter gottschalkii
MSINDNLGDASSDLENEIINSKNGDIILIKPGTYNIHNITITNKTITLQGIGNPSDIIIDGGKQSSIFLINNITTCVTFKNLTFINGLSYNFGGAICINTGSVYIDNCQFINNTALNNTNAGAISNYGNEDNKAYLLVNNTLFMNNHADHDGGAVTTCYANSDMYNCVFINNTAVRDGGAVRVSVYGYGHVEDCIFMYNHADEWGGAYYSWSGTSKINRCIFMNNTAGTNGGAVMVSGNLDLENSIIVNNSGGKTGGSFYIQEPMYQAKTYINVNNNLITNNSSPKGQEIYVKWRHSQNLYPDFNDNDWGSEDPNDYKINDPDNVTARSKVKTTTDKSNLLDELNFNALNKYYDLIKDYFPENYLENIKKQAESKANQNKENNKNNTPNNKDEHGLKDSNNTKNSLNDSKIILSNKTTENIETENYLISSNSTTPIGDDEKAYELNETKSVSKSQSPRLLYLVICLVITIIALFIGYGKENSKDK

SEQ ID NO: 10281 - protein, 954 aa, Methanobrevibacter gottschalkii
MIGVVCAEDNNVTENATNEDFQAIQILIDNANPGDSIYLENKTYQGSGSPIIVNKSVNVYGVDSSKTILDASNKSSIFLISKDVKVNFNGLTLTNGYNETKGGAIYNLGILNITNSKISSNYAESGAIRNEGTGKLTISNSLFDKNCGSFGAAIDNYVGYLNIVDTTFTNNDCLEGGAIYNRFGEFLVYNCTFINNSAARGGGVYNNRGGMYIYNSRFIANNVYDLGGGIKSWGSCEVYNTVLINNTAKQGGGIYVSEFTLIAENCFVENNSAHWGGGIAVEAKATAKIKNATIINNLADRGAGIDINMGSIDLQDSIVNNNVAKYGAGGIYFALLSSTVKNTYICNNIANTSGGGCYIYGFRGVVVNFTNVIINNNSASKGGAIYSTGTANIQNSILNSNNAYKGGAIYNELNLTVKDSQFFENTADSWGGAIYNNLNSFIDNVVLNSNEVKQFGGAIYNEKLVNAKNSLFESNKALQAGAIYSTNDLIIDNSQFIKNYVKRNYCVLMLSKGDVNITNSLFKFNTNADEGGCIFNYNANLLIDASQFISNDARSYGAAIDNSGNLTIKNSLFYKNKAYGAAAIDNSGNLVIIKSNFTDNVATNNGGAIDSNGKLIIIGSIFKNNLAGNNGGALILRGDTTVTHSIIYNNHDKNGYAIFNKGVENISLSNNWWGSNNPDFEKLLNMGTSDDFNWIIMSFSSNNQLIQYKNSILNINFDNVKDKMGNVYKINSTELLPIFKIALSNYGEVTISNGFKSMNKNIPLITSISAKIDNQSIILKITPTNKRIIDNKNIVVDYNGKVTYKVRVVGVDGKIVGANVAVVMKIAGKKYTVKTNKNGFVSKLFSLTPGKYSIITTYKGFTVKNSITVKKVLYAKSITKKKSKKITYSVSLKISNGKPIAGKKITFKIKSKTYTAKTNKKGVAVVSFKNLKVGKYSVIVNYLNSKVKTTLKIK

SEQ ID NO: 10282 - protein, 1472 aa, Methanobrevibacter gottschalkii
MKINKILVLLSFILVVLICTNSVSAFSDDSNLTDDLSSFASDFDKSNLGQNIEVNLDKLSFSEDSPLSDTIIVEEVEKDHNEMDDSTIQKAINNAKAGDTIIINGTSYVHCHFIIDKKLTIISNVGTTMEPCGSDAVSGHRGIFYISPEASGTVISGFTIRNDVAKADDYGILVRGADDVKIQNCVIYNNGLSSDAIRVENTKNTVIENVSISKAFNGIRILDSENVNISDSFIDNAKYCINVIDSNKINLVSNNITNNKISGIAISGSSKNINILSNNISKGHVGINLTVANHVYIISNYIGLSDKYGVYTNCNITKMEIKGNFIDRNGNYNIFNDHRVKNLFVNGGENKQVINNNYMIGGDNQDRPVWHQVYEYRPGKGDNTYNPETDTYTYVGEDNGDYYGHQSGTFMGYVLAINQFLQCPNIYFTFPTNGVTPWTKTGNYNLYLSEITQVKKGVYSISIVDVDGNLAEEISSVPVTFYLMKNNTDNNGKQKAPQEDDVSKVVMMKNGTATVRFYPDEFKESDNILLASFPGIGNNIYSNMYSPYKLFSIDDKFIPGNVTETKVTVSNLNTYPNSNAIFKVILIDLTGNAIANELVNFKINGKSYGATTDVNGVAKIKISQSKEGTYTIAVNYIGDDIDYTSSSAQAKVAVKKISTKILSSNVYMIPNIAEYYSITLKDASGHGISYQKVTFKLNKKIYTVKTNKNGVAKLKLKFTKKTTYYIHVNFEGNSKYKAVSKTNKIIVKYSSKIAKLTVPKVTILPKTYKYYTISLKNTNGKGIAKQKITVKLNGKTYIKTTNGKGNVAIKVKFSKLGAYKVSAIYKGSKIYKKTSSNGKIVVAKSSTKFTAPKVTILPYEKKVYTTTLKTSAGKALSKQKITIVLNGKTYSKTTNSKGQASINVKFSSENVYSVILKYSGNGYYKSSKATGTITVSKISTQLISYNKTFAIDSTKNFTISLKDKSGKTLSNQNITFLFNNQNLTKITDENGIASVNLDANVGSFEIISKYCGNNQYKSISNTNMITISNKTNVVFVDASLPNSEIQKIFDDCKNGSNVEFLGNSYNDISLNINKPLNIYSENRITLNAKSMSPVFKVLASDVKICNLSIVGNSYDGIEINNAVNVVIFENNILNRLDQSKIGEYMLSTISLPGYGINVIDSKNVEISNNSINTFESGIFVSNSNNLSINSNVLKENNYGIKYGFNVSNSNITNNMISESIGLYTNLVPEGPRGYGVFLNNSAVNVTIAKNNISWNHLGISIDANYSTGILITSNLISDNVLEGIRFNEGYDLAKNAIEPVVTDNAIYRNGRGPSMMILGELSANPAGIYGPGAFNDSLKLKLGANWYGKNLIVTWDNDTGVVGYGTMCPRINTTGIAFKEITCVNPGTYSITFYKNDEVASKLPVFNMYATLNDNVEIVFDVINGVGVFTFDTQKFTTGENVIKVSSGSLNDSDRIFKVEMSKTLDDSEVPI

SEQ ID NO: 10283 - protein, 182 aa, Methanobrevibacter gottschalkii
MTIKRCSWVTDEEIYIKYHDEEWGVPTHDDQELFEMLVLESFQAGLSWITILKKRENFRKAFDNFDYMKISEYKEDKVNELKENKGIIRHKGKINAAINNAKIFMEIQNEFESFDSYIWGFSNGKIIKAEFKTESELSKTISKDLKKRGMKFVGPTIVYSYLESIGIIDNHQKSCFKFNKTD

SEQ ID NO: 10284 - protein, 450 aa, Methanobrevibacter gottschalkii
MNNALKLKLSMFFLMMFVMIFYMLVFGKVNIVIGLMVVVAALLNLGNDLSYNPKLSFIKVFSLLMILGFASYLNNPITAFGCILTFFIVFGTTFTSYHLFGTHVYLPFLMIYFMMVVIPVPLEALPMRLLSLAIGAIFIVGLNLKVNGKKYSKLSKFTISSLINELLEAIDLKLDGKEVSMDSFNVANGFYRSIFSKFEYKYFPNQKHECILNILKSFQYIGWSLSNYELSVNELTHIKRILNDIKNFKFSEIEEITGETKEMNLILLNLKIIVNEASKKNIEKEKKIPNKYVVFNVLKHLIKRQFSFKSAKFTFAFKMAVVLTLWEVITLIFNFPYTKWLYFASIPLMLPYIDDVAHTAKSRMGGTLIGVSAFAVIMIALQYIPISSYIAMIIVLIASLFGMVFSLQNKLKLSSFTTLMSVTVSLMYITPPKAIKNTVGYCCNDCCNLY

SEQ ID NO: 10285 - protein, 141 aa, Methanobrevibacter gottschalkii
MIVVTFINYGFLPFSVEKETKNNLKTSYVLNRCFVNLIKLKCEGKNINKTSLLAVSSMVHENIELTNNNKELYQMQTKTTNISNSILNYIEIYGISSEMKVKIIKVIENKGNFDNHENIILYSINYVVNLLNEEKNLIESI

SEQ ID NO: 10286 - protein, 380 aa, Methanobrevibacter gottschalkii
MVELGLGMMRLPVLDENDFSSVDYDQITKMIDALMDAGFNCFDTAYPYHEGLSEVALRKCLVERYPRDSFKVFDKLPTFAITEESQLEPIFKEQLERCGVEYFDYYLMHNVSGYSEKGWLDVDSFSFANKKKEEGYIKHLGLSTHANAEFLDNMLTIHPEMEFVLLQINYLDWEDEGIESRKCWEVARKHNKPIMVMEAFKGGFLSDVPKEAEKLMKEYAPDKSVVSWAMRFVANLDGVFLVLTGASSLEQVEENIVEFNNATPLNDEELNVISEVSEIINANITVDCTKCRYCVDSCSEEIDIAKLFDLYNKEKILGENDWSPIGNAYVNYSKIPGVGIASDCTECELCIEECPQEINIPEVLKDVAKTFETEGYGFTN

SEQ ID NO: 10287 - protein, 116 aa, Methanobrevibacter gottschalkii
MIPGMNKRQMKQMEKQMKKMGMKMEELEGVREVVIRFDEKELIIDNPSVSLMNVMGQETYQVEGKAHEVELDYEIEIPEEDIEMVANSAGVSANKAKEALEECRGDLAEAIMKLNQ

SEQ ID NO: 10288 - protein, 247 aa, Methanobrevibacter gottschalkii
MTLIVHISDLHVCENEFDEDIFMQAVSEINNLKPDMIILTGDITNSGYYYEFQQATKYLEMFEAPLFAVPGNHDARNLGYQTFEELIGERSWKLTMGGNLTVIGLDSSSPDENRGHIGNPQHMWLEHQLDECTINENFSIVALHHHVISIPQTGRERNVLSDAGDVLKTLTNHEVDLVLSGHKHVPNIWKLNNTIVVNAGSLCSKKLRGKIKNSYMIYNVTEDEIEIFLNNINGEKFLFGKYARNVL

SEQ ID NO: 10289 - protein, 341 aa, Methanobrevibacter gottschalkii
MKVVVDASNVAFSVKNEMGQPQMSNILAAVKALEEGEDEFVIIADASLRHDIDDKETFLKLLESENVEEVPAGNDADHFILDIASREKAKVLSNDKFRDYAAEFRNISSIRIPFIIENNRLTFGKPKKAKKDKNILQHICDEIIKELNFKKWEIYTGKEGLEISPLNIAKQAIIRIDNENNTESKLENIFSKIPMFNKIVEMVDDVEIAAPYVIFVLVHPKDYKLAVKNAGNISVTVADRLGLEKKPLIAVRNDLFTKQGNFELNIMLADEVTEYAPYNISVRVCDSDEIFIKRNSRNIASTIAGRLGSWKFPFVSVKPDMLLEKPGDFEIELEKGGGLDG

SEQ ID NO: 10290 - protein, 400 aa, Methanobrevibacter gottschalkii
MVNPLTKSLIKVTTNLTPISVGTKFFPTNSLETEYVELFNYTQTILFELDKAEITSDSILENLIRDVGVENLPKDYNFYELKPAENRIEEYALVSNIIMGNDRYFYIELQNPSHLINIFVKIIENEKGEVVEKTATELVAKMLSKNDAIRVAIELIGIGLSEGIQVISAVGMTGAASIERAIHYTQNVGSFPGIAFTKLGGEYALVFDSPFLLQESRPVDLENYLFIDLIDSTKFIDKNGRNQLVDLMTGIKNFIETECNGELEGYREGGDDFIARFPSKDLAIRAGLDAAWFALDNGAKIRAGVGRSRREAGERAQLVDDLKSTAPLSLVVFELANGLYAYNIPSEFTRTLINLIENEKAKLIGVFVFVFIFAFIMSILGLGVFSFIGVIIALVYAFVA

SEQ ID NO: 10291 - protein, 125 aa, Methanobrevibacter gottschalkii
MRRKKDDKRVLFSPNSNRPKHSNKRKLNLPNFQRQPQRSRKQSKWGNVTVFLIILALVAFVVGAGMGVSLSFDNDDGPHWKNVTEEMTTNLNETDNFTYDEEVDGVDFNSNETLTELNVTVKPSY

SEQ ID NO: 10292 - protein, 407 aa, Methanobrevibacter gottschalkii
MEFIKDLSGGFSVIENLMVSGAREGKFGVAIIYSPNSTASAVFTSNKVVAAPVNYTKNVLKKGIISAVLVNSGNANCFTGKKGFKDCETLAELVSNDLNLPKDEIAISSTGVIGREMPIDIISKVAYESLSKLGNGPENSLAAAKAIMTTDTFPKECAIEVTLTTGETVKIAGITKGSGMIAPNMGTMLSFIVTDAVIPSDEINKALKKSADISFNMIVVDGDESTNDTCLMMANGTSNVEVVNEGKLDSNFQEALNYICIDLAKKMARDGEGATKFIEANVYGAKNETDAKLAAKSIISSNLFKSAVFGGDPNWGRIVSAIGYSGCDLNPDIVTIAIADDSDDVDLVCNGKILAFENTPNLKRAEKIMQSKNVKVNIDMHLGDGEATAWGCDLTYDYVKINAEYTT

SEQ ID NO: 10293 - protein, 34 aa, Methanobrevibacter gottschalkii
MAKVKGTNRRTRQKRSYTKPGSKRGRGVKQTWKK

SEQ ID NO: 10294 - protein, 196 aa, Methanobrevibacter gottschalkii
MNGHRAHGFSSVHFLDSDEILNELNLKGDETFMDAGCGDGHIAIKVIEDYLPKGTVYAVDVYGASIEDMETYKNENNVENLINIEADIPKGIPGVEDESVDVVLMVNVFHGFKASRTIDDAIEELKRIIKKDGKIAIMDYKAWDVPKGPPTAFRSSPEELEEIFNKHGLKMTYLNEEIGEDIPEGKSHNFIVFQKE

SEQ ID NO: 10295 - protein, 267 aa, Methanobrevibacter gottschalkii
MKSMKTVAVAIIAIVVIVAVGLYLTGSVGTSNGDLNGQDVQLAAAASLKNVYDEKLIPMFEEKYPGVKVTPTYASSGDLQKQIENGLKADVFMSAGNKQMDALINESYVDNDSNVKFLENKLVLIVSADSNVNVSSFEDLKNVNGTIAIGDPESVPAGQYANESLHNLGIWDDVESKLSLGTDVTAVLNQVAQGSADCGLVYTTDAKSSDEVKVICEAPEDSLKDIVYPVAPIKDSEHADAANKFMEFLQTPEAQSVFEDYGFTIHE

SEQ ID NO: 10296 - protein, 224 aa, Methanobrevibacter gottschalkii
MMDWTPILISMKTASLSIFITFFLGLIVAWGIVKIKKDSIKIVLDGIFTLPIVLPPTVVGFFLLYIFGVRGPIGSFLIDFFAVKIAFSWSATVIAAVVMSFPLMYRSARGAFEQVDSNLLDAGRTLGMSEWKIFWKVLFANALPGIISGGILAYARGLGEFGATAMIAGNIAGQTRTLPMAVYSEVAAGNMGDAFNYVIFIIIIAFIAIFIMDFVSIRKEKQWK

SEQ ID NO: 10297 - protein, 394 aa, Methanobrevibacter gottschalkii
MRCVGTVVRGIRTPIIKENDDLANIVVDSVMAAKESEGFEFKNKDIVAITEAVVGISEGNYVTVDDVAQDLQNKFPSKNIGVTNPILSRNRFSIILKGIARGMDKITLLTSFPADEVGNGILDEEVLDASEYNLASVISEEEYKKTFGSWKHPFTGINMIDLYRELIESEDCEVEFVFSNDVKTILDYNKDILTCDIHTREKTTKLLKSEGANVYGLHNVLSEPIGDSGFNPDYGVLGSNKATEEKLKLFPKTGNKLVNEIQKRLNNITGKQIEVMVYGDGAFKDPVGHIWELADPVVSPAHTSGLIGTPNEIKLKYVSDNKFANLRGEELKDAIKEEIKNKDKDLTGQMITQGTTPRRLTDLIGSLCDLTSGSGDKGTPVIFIQGYFDNLAND

SEQ ID NO: 10298 - protein, 197 aa, Methanobrevibacter gottschalkii
MEHKHHGKSSAKFLDSDEILSELNLKGDEVFMDAGCGDGYITKKAIKDYLPNGFVYAVDSYDKAIELMEIYKKDNAIENLINIEADISKGIPDVEEDSVDVLLMVNVFHGFIESSHRDAVIEELSRIIRNDGRIAIMDFRPVELSFGPPIEIKCGPDELEKLFNEYHFKKIHLNEKMGPKGPNGNSHYIIIFGKEQF

SEQ ID NO: 10299 - protein, 236 aa, Methanobrevibacter gottschalkii
MIFAAILAGGIGSRMGGTDTPKQFLTLGNKPVIIHTIEKFVINEKIDKIIVLTPKNFINHTNHLIEEYILYKDDIIVIEGGRTRNDTLMNGIDYINEHYGIDEDSIILTHDSVRPFVTHRIIEDNIDAAKKYGACDTVIPATDTIVESINGKTIESIPVRDYYYQGQTPQSFNIKKLFNLINSLTEEESNILTDACKIFALKDEDVYLVEGELTNIKITYPYDLKLANTILEDIHD

SEQ ID NO: 10300 - protein, 338 aa, Methanobrevibacter gottschalkii
MINIVYRLKSPKFFEEAIDEIELEGVIVRPTYLSICQADQRYYQGSRPAEILEKKLPMALIHEGIGEVVFDESGKLKSGDKVVMIPNTPEGKDVYRANYSYDSKFRGSGFDGFTSDLIKLQSDRVVKIPNEFNPHVAAFIELMTVSYQGISRFSEIAITPKDVLGVWGDGNLGFITALFLKEKFPESKVYVFGKHLENLNLFSFADGIYQIHNVPKDLLIDHAFECVGSSASQSAIEQIIDLINPQGSINLFGVSEYPIPLNTRMVLEKGLTIQGNSRSEREDFVGVVETLKQNPKLFEYLGKLVTNICEINSLNDLKESFDKDYISNFGKTILKWDK

SEQ ID NO: 10301 - protein, 174 aa, Methanobrevibacter gottschalkii
MKKQDFLMKTKLIQETFNDKRKIKCQIPIQNLKLENHIHQEGSIFITENDEIIDLELQLTNFTEDELVKYVELAEALYETNNKYVSIYIICPNTVNICVKECEIKSEAEFSIKLAAVEENPAEILLNIIKNKIIKGEILDNEDLYALSMMPLICKKEERNYFRKEYFKIINNLN

SEQ ID NO: 10302 - protein, 454 aa, Methanobrevibacter gottschalkii
MVNKNVALMRGEPEIAVKKLAIPIMISMILTALYNIIDGIWVAGLGPTAIAGIGFVTPIFMVLNGASVGLGNGATSSISRFIGAKNHEMANKSATHSLFIFLIASIILTIIFMMMQKPLLVSYGASGQTLNEAIAYATPLFLGLIGFMFSNGCSGILRGEGDMKRAMYVVILTVILNAILDPLFIYTIGLGSAGASLATIASSSIAALVMLYWILVKKDTYVNVTIKKFKLDMNLTKDILKVGIPSSLDMLIMAIAMSIYLIVISQVGGDYGIATFTSGQRLYLFAIMPLTAIGSAVIAVSGSAFGAKNGDYLSRTHIYGSKFGLILGTIITLILVIFATPLSTLFAYTPETTNLVPGIALYLQVVCPTLILTGIGIPSSFFYQGIGKGIYSLMFTILREIIFVVPLIFLFVYIFHLDILGIWLGLCIGRAIASTLNYIFARYEVRRIRSKFGN

SEQ ID NO: 10303 - protein, 611 aa, Methanobrevibacter gottschalkii
MSKINFGNIVEIIKHDFKASFSNPIVTIVLIAIIILPSLYALLNIQACWNPYENTNEVEFAIANLDNGSTFEGTYLNVGNEIVKDLKNNTKFDWKFVTEDELRKGVHDGDYYAGIIIPKNLSENIASITSDNPKQAELEYLVNIKSNPVATKLTDTGANTVYTTVNAKIVQIINLAAYGKLGDLKDGLSSGAGQLYSGGSQLSAGAAKISSGAGQVSSGVSDVQNGASQVQSGANQVQQGSSAINNGASDVKQGSASIKQSASDLEKGSQQIQSQVDPSTLPEPMKQYVEGNIKLANGSGELAKGSSQLADGSVKLADSSSKLANGASNVAGGANQVAGGSVELAKGSLSLAAGAQMLSGSASQALFSAAGALSSSANSLSSITGINETELGDYFYSPIKLDRQEVFSVPDYGSNVAPFYIVLSMWVGAIITCVMITPGTSQGTKYKPVEMYFGKVILFVVMSMLQAAVTISGAYILGIYISNSPLFIFSAILVSVIFMILVYSIISALGQVGKGIGVILLVLQISGTGGIYPIEIMQDFFQTLYPYLPMTYAITLIREAQLGVVWSNYLPALVVLVSIGIVTIIVAALIKQKADKSSKYFEERLKESGLF

SEQ ID NO: 10304 - protein, 67 aa, Methanobrevibacter gottschalkii
MNLILSNEKDINMKFCPKCMRELKKVFHGEPTTELAIESLENEIIIGNSCMGNYNYYCEYCDEFFQL

SEQ ID NO: 10305 - protein, 308 aa, Methanobrevibacter gottschalkii
MSEQKLEVFNVLNFLDNGYEIDDILNEGKFGTFPSAQDCIKYMIDEGYLKGEFNAAIHNDGKSLTAEEVSKKYTVAELKDLLRENGLKVSGKKQELVERLLPALSGEITVEPDNGESVDLALTDKAQEFLNENDWMDLYMFALVAFRFEDYETYRKNSSEDNIQTALKFCDEIISRALIANQFLVFIDALSAKAHVYAYDKDYESFLDYDLQRFILGLNPIVMDSQTYANYDAINYANVINLKNVIEQLDLGSLKKRFDKIWDKSNIKSITVPKKTCYKILQKALAGSDVEELNFNVTQKYFVRKFGV

SEQ ID NO: 10306 - protein, 196 aa, Methanobrevibacter gottschalkii
MRNKVAGIVFIVGSLYYVLAEAVSATFFNASLFNTYSFHTISELGIPNVNSPLFWLMNSAFILIGLTLIFGNFYKFKDFLVKNRIIIYILTLMTSTGVIMVGWIHGGNPFTLGYHMLGAMMAIFGGNVLLIVISRSMSEYSKFQKTTLVLGIFGLAVFWIMFFNMESIYMPVFERLSVYTMIIWCFLTGCYIISRE

SEQ ID NO: 10307 - protein, 82 aa, Methanobrevibacter gottschalkii
MTNLDKSVEEEILAIIEKYQKEDTKLLNYLITDDEITFFSPLANGNSITAEDLHKVADILKGTFKGMQIVNQEYRFTFEIGL

SEQ ID NO: 10308 - protein, 225 aa, Methanobrevibacter gottschalkii
MSEDNDLKNFLIKKGASKVGFANVDGLAEGFIDLPYGISLVLKIPKKAMIYIENEDYESYWSCFHSLIDRLTEISIKGEKYIKNHGYDAFALTMSRNECDMKRLLSILPYKTIATKSGLGWIGRSALFVTPDYGSAVVLGGILTNMPLTFGTQITDSQCDDCENCQKACPVGAINPQKWNTKLNRNDIIDIGKCREYIVEQYKNGLGCTKCMYECKLTKKYLGRL

SEQ ID NO: 10309 - protein, 287 aa, Methanobrevibacter gottschalkii
MKDIDVLIEALPYIKKFHDKKILIKYGGHAMVDDKAKSSTARDTVLLKYVGMKPLIVHGGGPEISRSMNKLGKQAKFIKGLRVTDEETMEIIEMVLVGKISTEIVSELIKHDGQAISLSGKDSSLIFAHKKGASKIDEELVDLGLVGEVDCINTNLLEMFLDNDYIPVISPVGIAEDGTSLNLNADTAAGEVASAIGAEKLIILTDVPGVLRDPSDPTSLIQKIKVDEIPSLIDEGIISGGMIPKIETCINAINNGVGSCHIIDGRKKHSILLEIFTTNGIGTMIYK

SEQ ID NO: 10310 - protein, 489 aa, Methanobrevibacter gottschalkii
MLNITTFLDANSKRLDKDVLFNPTTGEKYSSGEILSIVSEIGRILKELGIKKGDRILIYLKNSEEYLFSLFAIWRIGAIAIPTNRVFTANELEYIVSDSKAKLMITDEEAKDLINVETYIPKNISSFKNCKVLESENTDWDDLCQLQYTSGTTGQPKGAMLTHGNYFTAIHNECDVLTLKQDDVFLGIYPMAHVGLSWAIAALRAAAYYILIEKFNMDEYLELCEKEKVSVLTGMPPVIHSLTTIDARKQLKTVREIISGGGPLHKKIWKDFHQTYQIPIINAYGLSETIVIGTGTVIRPEDYWEADRFESVGHPVCFSEVKIVDEHDSDIILPKYEQGEIALRGPAVAKGYWGNEEKTKSSFLDDGWFLTGDIGYLDEDNRLFITDRKKDMIVMSGWKIYPTEVEEVLIKYPAVKEIAIFSINDCHRGEIPVAAVVWKDGEECEGLVSYARKNLSRYKVPRKIFTLNELPRVNGWKLLRRELRKMFKE

SEQ ID NO: 10311 - protein, 352 aa, Methanobrevibacter gottschalkii
MNYHLNIINAILLIYEQIVVSEIMYDIAVISGDGIGREVMSACEYLLDKLDLKLSFKYGEAGFDCFNKNGTTLPEETIKLANDSDAVLFGASTSTPGQPSPIINLRKELNVYANIRPIKSYKGINSIHDDIDFVIVRENTEGLYSQAEYGDENKVIAERIITRRASERISKAAFNLCVKRGQSKVTCVHKSNVLKKTDGVFKESFYKIAKEYPQIKTEDFYVDATAMYLITQPQNFDVIVSSNLFGDILSDESAGLVGGLGLAPSGNIGDHNGLFEPVHGSAPDIAGKNIANPCSMILSASMMLDYLGEWEISNDIKGAIEKVISDCKIRTPDLGGDSSTMEVTKAIVKEII

SEQ ID NO: 10312 - protein, 154 aa, Methanobrevibacter gottschalkii
MESTIEELIELLNDKDDYVVEDAIGQLELKGADALEPLMDALSHRKKNVRLHAATLLGAINDEKAIPSLIETLKDNNKLVRREASTALSRMGAPAVDPLIETLAAEDWRVRGAAAWALGNLGDKKAIHELEKLLDDESAFVKAGAKSAIESIQK

SEQ ID NO: 10313 - protein, 296 aa, Methanobrevibacter gottschalkii
MHYTGPVYRPPPEANTPLLEVTYGCSWNECSFCTMYDTQKFGISPIEDIEEDLAELSQFYPKDLKRIFLVNGDAFALQAKKLFAISDLIHEYFPEVECITCYASIKNIKPKSDEDLEKLRQKGFNELYIGLETAYNPALNQMRKEYTQKDEYEQLERIQNVGMDYNALLMLGVAGRGNYKENIDATINLLNTFKPKIVGPLTTSVQNPSPLHEMKLKGEFVEATEREMICEELMLLENLEMDDDCFFFGGHPYNLIRFSDSFKNKDKMIENLKNQVFQIDELRQGILDTVLPRGNL

SEQ ID NO: 10314 - protein, 175 aa, Methanobrevibacter gottschalkii
MRICLYGSGSAEIDEIYTDAAYELGCMMAQKGHTLVFGGGDTGMMGACAHGVQDTNGKSIGIAPKWIENFEPLCKECSKFIYVDSMDERKNKFLENSDAFIITPGGIGTLDEFFEIITLKKLEQHDKEIIVFNIDGFYNKMFDMIDDMAQKGFLYNQYEIFKIANTLEEIFNYFD

SEQ ID NO: 10315 - protein, 184 aa, Methanobrevibacter gottschalkii
MESEYILIELKELSSHDTITKKELMGLLKKYASIISVYDLMMATAHMRKDGEYVHANYREKYLEVYIKYFIMRMKEVLENEDYNYKTNIDKKSFDQSFPMLERTFEKERLTASKDDKFPLIYVITALYTTFILEEPIHPVGSEFPGSLKVEKRNGEFYCPVKDNQKDNTNAICHLCLAEQTPDI

SEQ ID NO: 10316 - protein, 214 aa, Methanobrevibacter gottschalkii
MSENFMEITKEDIENIENALKSNADYKLNNTKFDIKSFEKGGDISLIQYVADVENELVFQTKEENGKYYISEIFGLFMDNIINGNVSRDVFQSVSDYFHEVIAGEKNDFEDEKEELINFLVLTEEYDANKLEMDLNPSKIREDYKKDYGEIYGDDSLNRVQKSLALKELLHMSICQVVNDIDLFFTRPYDLTPEENAEKNKQEQKALENELQMS

SEQ ID NO: 10317 - protein, 155 aa, Methanobrevibacter gottschalkii
MITITKKEEVVLDQVKIFNLEYSDGIPVNILRKELGFHEYDLVHILEELQDKDLVIFRDNKVSLSESEKEINTVNSKKDIEQLELNLKEKESYNLIKSLVDDKNLISKYTLEGHLLYGDLKLTNFRMYHIILSLQNKGLLKPIDKSDGEYYLLVE

SEQ ID NO: 10318 - protein, 145 aa, Methanobrevibacter gottschalkii
MSLPKKLLADFDEVLKDRGYQSRSKGIRDALQDYIVRYQWMNSMEGQRIGIVTIIYDHHYTGVMENLAEIQHSFRNEINTSMHIHMTDKYCMEIVVVNGDIAEIRDLTERIMRLKGVEHVKLTSTANGEEFSEPGHSHDHGYHHH

SEQ ID NO: 10319 - protein, 255 aa, Methanobrevibacter gottschalkii
MKFKTTSYHFDLLKDNDRVSAFFEAINDYEGNNNLAYDLGCGIGVLSYFLKDHFGEVTSLEIDKKAYCCAKENLKSFDNVEVVNEDVLKYNFTKKADLIVCEMLDTALIDEEEIPVLNYAKQFLKEDGKIIPQGIINTAELVNLERHYVHWDEEVNYEVYSKPIVYSEFNFLNEINPEFGAYLTLKTDKSGIINGLKITSYTKLNDKLIVGPSPMLNPPLLIPLDEKSVNVNDLINVKLKYIMGNGIESIRTEYY

SEQ ID NO: 10320 - protein, 160 aa, Methanobrevibacter gottschalkii
MSFDLELNDFIMDFKKLVVLGVGNELKSDDGVGPFIIKKLIEENIVNDNLILINAETVPENFTGKIRKEQPSHIIIVDACLMGAQPGDIKIVDKDDFANIGISTHSMSLSYFVRYLERSNDFKIIFVGIEPETMEWGENPTEKVENTAYYFIDLLKECIL

SEQ ID NO: 10321 - protein, 364 aa, Methanobrevibacter gottschalkii
MKLLFIGSRLYDDIDWYVKRKNIESVLTESNENAINLDLPDQVFIVPRGMDGPKQVALMQKVDAIVPLIGIDPPLMDVALMKEEIEEKYGIPVIAAGVRAVELTSNKIETKKFYKEIGVVTPDYQILNDPEDLTLDFPVVLKQGEGQGGKDIKIAKSIDDVNEYFENFNQALCEEFIEGSEISIEVLGFNGEYVALPPIYKGETTLEGTHPLNKIKTGPCMVQGLDNNLVQHTAYKIAKNLASDGIFEMDFMYSAKKDQLYAIEVNTRPNGTRYLTTATCGVNSLCELVNMAIGEFSLHNISDKLGYYYSTEIPIGNYEGPAPIKPEKSFENNDFVVHGPAGYQRVTARADSKDNLESLVSKLV

SEQ ID NO: 10322 - protein, 356 aa, Methanobrevibacter gottschalkii
MNNTDMLILFLITLCATIFFTWYIKRILIKARIADNPIVSEHRHKSGTPTMGGIAFLFTISLIIALYYQNTPILLVSFIMLAGGIVGLVDDLIGLKVKEVQKIVVNTSSDVITLGRLDVEPNEEVRVATPKAKAEVDDLLKDGKVEVVGEVPIKTEPGELEKIICQIVLGLFFALTGIITAVGGFKLGVLAIPVVVIAILGSINSINLIDGMDGLAAGIVGIASIACCVYGYLFGPASIIPPFLILSGLCLGFLVFNKHPASIFMGDTGSFVLGTGYAAAVLVCDIPYFGVLALGVPIISVVVSLLHRAHIIKLPVEPLHHTLNHYGMSETRIIVSYWGITFLLCIIGILAKMYVF

SEQ ID NO: 10323 - protein, 476 aa, Methanobrevibacter gottschalkii
MDIQELVRLVEGELVGNVDFFSIDGFSGRFTFLNDAHTGDIVVRHWIDGNGVAMAFKKNIACLITQTPKDDAIEMAEKLNFPLVITNKIELANALALSHTIDKYSHNSTNVVITGTNGKSTTSHLIYHILNNAGFHVLTNTDSESEFNTLIDPMVSKLISDEVKKNGKLDYLVIEVSEVQGWLGKLMKNHAALMSEAIKPQVGVITNIAMDHIGLVNSIDDVFNEITAVPKAIGDGICILNHDDELVRKLNAKNPFYTSMSKIDGDNAVYFDDGTIYYNDNPILTIGELPFTGKHFIQNILSAIGACISLNLPIEDIVDGVRSYKALNRRFTKLNDEPLIYDDFAHNPDGIKATISETLKLLPDNQKLYVVCAIRGSRGVEINQLNVEAIVESMDDGIELVLSSSNDVVNNLNWVNENEKEVFFNVLNQNNIDYVHFDNLKDCLNEVYNKADKKDIILLIGAQGMDHAEFLLKDII

SEQ ID NO: 10324 - protein, 146 aa, Methanobrevibacter gottschalkii
MFIKIRRDTLIILLLAFILILCGRLITYVAFASSDEINDGIAISGVIIKGNDIVPVDTIRSNVMQAGFRDGSVIYGDILKTSKREVSLQDAIQTAQEFATRSTVPGTSVQPITAADVQVDKNTGVVTVTVIEDFSSVELDNKTSGG

SEQ ID NO: 10325 - protein, 419 aa, Methanobrevibacter gottschalkii
MNKLKLSLVFFAVLLLTMSSVAATCNIIVITDPSGNDPNGAAAGSMSFADNMFQSTFLLSRSNHFAVLSGGTGSSDTRLDSIVDAVASLENNASAASAASLASQFKGARLVVGGPNIGAAVGGSFNAYVITVDDSSNDIKVTPYNSGVATLQPGQKGAIIHLRNTAGNPLYGTADSVRKETAMNIGKMIRDGYPATTILAEAMGEVAKDSGEKYGGGGVNLVSGISTSDMFTPKELNSTGYPMDEEYSKVCDSCGWAMGFPAAEAYEKCPVCGGDLRTVYAYQALGDALTVSSKAVSVSVYGSDRPGLAETTKEIVEASVSKYGYDASAISGSINRGINNGLLVGVDHVEPKDINVKQGSKAVGVYYKSLPSERSSPAWDLPIDGNILTILGSIQTAVGIILILLVLFRSRLLKSFQNR

SEQ ID NO: 10326 - protein, 143 aa, Methanobrevibacter gottschalkii
MALILIRGETNSKLLNAIADMERHGNLNLITKPKVVDSKFADSLVEKILNSKLRTKSKVATAFFVKEDTTLSIMQVKKIHPPAHVVVVSDEYEGYHKLKKLLDNAKVFQGYYSHKAKNDGLIDYSIKGKKRHVKNEKLNSYIK

SEQ ID NO: 10327 - protein, 164 aa, Methanobrevibacter gottschalkii
MECEICGKTVPENNPIRAKIEGSVMVVCKECSKLGTIQKAPQQPKFRQQPKGKKAKNTKNTGNYSRRDEPSEELIEDFNLKIRKARETKNWSREDLGKKINERVSVITRIETGKMTPDTKLTKKIEKTLNIKLLEKVNNIDLNQFINTSTGERALGSIMKIKRK

SEQ ID NO: 10328 - protein, 418 aa, Methanobrevibacter gottschalkii
MDDFNDLENSSKEQLMEKVEDLQNEIDLLKEEKSKAKSNLMWKVRKLEKDKVLIENEKIRLERETKSLRSEVDRFRSPPLVLATITEVLDDNRMTVKSSTGPSFLVNYSKFLDEKLLVPGSRVALNQQTFGIVEVLPSEKDANVSGMEIETKPDITYEKIGGLEEQIREVKETVELPLTEPELFENVGIEPPKGILLYGPPGTGKTLLAKAVANETNATFIKIVASEFVKKYIGEGARLVREVFELAKEKAPAIIFIDELDAVAAKRLKSSTSGDREVQRTLMQLLAELDGFESRGDIGIIGATNRPDILDPALLRPGRFDRFIEVPLPNVDGRREILKIHTKNMSFDEEADLDLLADLTEGLSGADLKAVCTEAGMFAIREKRDKITVTDFMDAIDKVMSKNKEDEMFNTEAGVMFG

SEQ ID NO: 10329 - protein, 319 aa, Methanobrevibacter gottschalkii
MLFNKNENKANERIIYKTKSNVILGCKKAIYGLVLLIIVLSISPIMIKFIAKMQVYLISQIQLPLTRYAAIAFFVIILIIVIYIIWHIIGWYSLEYTLTDSRIMVKSGVISTKKNYMPYATIQDVTTSQSILARLFHIGTVSVFSAYDNNRLELKNISNPSEVEEIIFSNMRGSRTFQPQQSRPINYHQQDNYLDNGSYLGRNEMYDEFEPITPITHEKDSYQGRDYEYYPEDRGFENSDQIRHEYEYEPYDDIDRFVEEFEPHKNYPNEIYDDELDEDYYEFGSKNHYDEKRNEVIDNDSNSLSSEKVIRRHFDKFKK

SEQ ID NO: 10330 - protein, 344 aa, Methanobrevibacter gottschalkii
MELLCIQSQEHPELPLAELKAVMECENISAEIDVITEGLVILKNISNDNIDSYYEILTRRLGYTHEIHEIIKESNTDNFDEDILSINWSEYIDGTFAVRVKRFNTEIGTVATERRAGSLILSNSDNIKVNLSRPETLIRIVVHKNDFYIAIERIKLNKKHFEDSKPHKRPFFYPGSMNPKLARCMVNLSRVKEGQLLLDPFCGTGGILIEAGLIGCKLVGSDIYWKMKNGTSINLDYYGITDYRTFNIDVRELKMYEKVMAVVTDPPYGISTSTGDIEGEDIFKEFFKSIYNNMRDDAYLCMASPHYVDLKPMADEIGFDIVEQYGIKMHRSLTRIISVICKKH

SEQ ID NO: 10331 - protein, 46 aa, Methanobrevibacter gottschalkii
SIKRITYTTFVETKEELIKLFKKEYYKIINNESFFNKWVSKYILKS

SEQ ID NO: 10332 - protein, 301 aa, Methanobrevibacter gottschalkii
MFKDRIVNYYIDKSMEYGHNHLNKKAIDCVDKILFLDKNNARALSFKGLYYAFLFEKEKSFECFSEILKNNPDDVHCYYRKGLACMELEKYEQAINCFKKVLDVDPHHPIVLRYISSCYLYLEEYDLAFNSINDVLKEDMENPELLLSLSLYYDVLEMYDESLNILNKIIEKNPNEDNALLQMAIVYRNQEMYDDALKYIELALNINADCIVSKSIKYNLLAYVGDFEHSLQGFDEISKTYFDGWGVIESYYSYYGESLEVMGKYEDALKVYDEYLEKYPNFPKKMIENMKTDVKKLIKQC

SEQ ID NO: 10333 - protein, 67 aa, Methanobrevibacter gottschalkii
MGSAEEVGKYLKKLYKNYKDAKSKGEVLKFVKSNIKELFALSLYFESIETVNLLINLFLYELEKDKG

SEQ ID NO: 10334 - protein, 250 aa, Methanobrevibacter gottschalkii
MIEIHDKLGTLDELLVIIDDLLLDERYDYNELLVQKGNILSIQGKDKIAMKCFDKVLQDDSTNLWAYYFKCYVLNKSDDLSNFDKLFSMVKSQSPDEYYIWLLIGVLFSRNDRFDDALYCIDESINRYDGQEDSWLYKGLIFYEMGKYDEALSAIDIALKINPKDSYLYLTKSVILNAMEKYDGAIFYSNKCLELDKNNVLCLYNLSLSLYNQNKFDESLKYCESALKIDPNYCLSLNLYAEILRHKKKV

SEQ ID NO: 10335 - protein, 299 aa, Methanobrevibacter gottschalkii
MFKDRIVNYYIDKSMEYGHNHLNKKAIRCVDKILFFDKNNARALSFKGLYYAFLFEKEKSFECFSEILKNNHDDVHCYYRKGLACMELIEYEQAVDCFKKVLDVDPHHPIVLRYISSCYLYLGEYDLVFNSINDVLKDDGENPELLLSLSLYYDALEMYDESLNILNKIIEKNPNDNDALLQMATVYENQEMYDDALKYIELALNINVDSIVLKSIKYNLLAHVGDFEHSLQGFDEISKTCFDGWGVMELYYIYYGGALEVMGKYEDALNLYDEYLEKYPNFPKEMIENMKEDALKLIK

SEQ ID NO: 10336 - protein, 1346 aa, Methanobrevibacter gottschalkii
MLQAKKTITVTVKSIPTSLTVNDLTCNYGEDNSYLYATLKDTKNNKFLNGQTITFKINDKIINVVSDNKGRAKIKIDEKPGLYNVIVSFTKSPYASISKKINVNVISFNPTVNYDGGFYNKSYLNLSLNINNAKLIKYCLNNDSWSQSDKSVSFILTNGIYDLYYSNGSGSIFHEHYLIDNNCPVVWSNFGSDLYDSSIIVNLSSWDNLDANPKIYYSLDESNFKLYENLLNISRTTLLKFYSIDFNGHKSETKTCNYIFEKIGNLNSGRGFTTIQSAIDDSNTHNGDIIKISEGLYNEPLTVNKFVTMIGINATLTSRDPSRPVIGITGGGSNSVIYGFKIKDSEHGVVIYHADNVSVINNQFINVVKSIEIDDDKNTLVAYNSIDSDKFLNFMSGVAIRKSDNLMVFNNNISLNSDTGAGGIVVTNITSNNISIVNNRITNKNNLNGIGLYVICSNVSIDSNNVSNFNAGLYVVSSNSHVTHNEFKNNNHGVFLRVSVNNTYAFNNIHDNILCGFVLDTSLLSYNDSCYLNRLCDNSQYDFYSEANSDYVINDNWWGENTPKISINRSILANIYNATGNVIMNSWMVAHLFSSSYKINENNNIERAKFYVDLTYNNIGNDLSYKGYIPNNLKSFIGVFNGDGAKKSNISYLHEGKSFVDFELNDLFKNHENITVMSIFDNVKILNSFNKKVTIDIMLFSSAWDFENNYFVNKTYQIPFSNNASWITFCWSETGLFTGKIYVIVNGEILDEINIHNLFYQKFKNNYSTNVFEAIKLLDTVFASTKEGVWAPNGYYFSFAKAANIDFRDYNSVYNRFLNYIKLYYDLTDSDLNFVKNYKGFFIDFIDMTIDFHGDMTPDINFDYNGVHKLLKPPSSYAHRISNIYYTDIEDENNISIGYEGMRSFAIVKDNLTNDDLQFWLNQKELYAPGLMKAAYGTFLTSLLVIYENDRVADESAIKFNVTWSRISPVCVSLCNDYNCLYVTGESDHGMGREAIGNISDVWKFNFATSFSFSLVEQLVGNNIWNDTTIGSVTLGLIESYFNNETMEIFTSNGYIFIKCENDGNTLLFLDLKTGIVRDYFSYYGLLGTMPCYHDNITENAWKYGNNLLNNMGREFNDLKNIFGIGVISATLIGEVEFIGLEMSGIGSALIEGSEIGLLFGEISIAPIMLISLPIIMFLFPEQVNEVWMNFASLFNPYYKDYPDIPIYENTYPANIINPPKLVLDGKSSDDYIISQLKNNRNFNNKYKRYNSNVNKDNINFKIKIGPIPSGKGPKDMDNLGSAEEVGKYLKELYKNYKDAKSKGEVLKFVKSNIKELFALSLYFESIETVNLLINLFLYEIEKDKG

SEQ ID NO: 10337 - protein, 266 aa, Methanobrevibacter gottschalkii
MKKFYKAVLLLTFCFFICLDCVCAVSDNVVENDTLSVDCQVGELCSDTIEVSSDNYYIDNNVVNSSDINFTDVYSGNVVKKVKSTVKTSITAKDITKYFQDGTSVKAYLKNSNGKVLSGKKITVTYSGKTYSRTTDSKGCVSWDVKKGPGTYSVKFSFKASGYKSSSKTAKVTVKAMPTTLTANNLVFTYGDTNNKLKATLKNKKGKSIVNKTVVFNFSGKKYIKKTNSKGVACLTITAKPKTYPTAISFTNANYVTSKKNNNSNS

SEQ ID NO: 10338 - protein, 314 aa, Methanobrevibacter gottschalkii
MRKPYVILIGSASGIGKSTISAELAKALNIKHLIESDFIRAVVRGIIGKEYAPALHSSSYDAYKHIRNKSRYDSYDELVSAGFDDHASYVIPALEKIIQRAITDYDDIIIEGVHLVPGLINIEQFRDEANIYFFILISDEESHKERFVKRAIQIHRGGKQLDFFKENRIIHDHLLTQAQNNNVTIIDTESIESSLEGILSIINKSCTTIKLINTIDELEDVVDIISNKNNGTLEKITYNIKGFKEPLIRNIDVYDTKSANRFINSINENKDKKEYLSQLYELSEFREARICASNQDNLDKIIKELQNKGYVLDE

SEQ ID NO: 10339 - protein, 192 aa, Methanobrevibacter gottschalkii
MNEMEINEMIIKCPACSVEGVAKSIMKEIEIPHFGKVLETTIQCPDCGFKHSDIIALEQNDPARYVIEINKNNLSVRVVRSQSATVLIPELGVKVEPGPKSEGYVTNVEGILTRFEDAVKKALNLFDDDASQENGTNTLKEIQNLKKGNGTATLIILDPFGQSNVVSDNVEISEIPENELNTLKTGFSHIEE

SEQ ID NO: 10340 - protein, 144 aa, Methanobrevibacter gottschalkii
MSEEEMMEETSEEFIDEDGEKLPFAKAEVVRLMKENLDDDKMIRERVKVEMNKFLGDVLKNVCKQLNDYPYTTVEYEMLKESTYPYTNIERINQEKERILLHLEAIKADCNALAMDVQKTLKLKDVVEEDTFSFTAPSEEDEEE

SEQ ID NO: 10341 - protein, 1415 aa, Methanobrevibacter gottschalkii
MLNKIQKIVIGKPFLISLIFVCLIFTSLGVSIEHSYAADLNESDKLGSGVNVEDKLENSQKNKSMSDTNQNPALKAKTYSVNGGTFRDIQNAIDKSSAGDTIKLSGKFVSKGDDTISMSKKLTITSPSQAILDGKNSTTILKIFTGATQSKLSNLRFVNGYSDSKGGAIVISAKSIAFDKCVFENNYANLSSGAIHTPYRAIATQGMLIKNCNFTNNGAGIAAGALGIFGHDFLIENCAFSSNYVKGYGECYGGAIQIGLDTEPSYGNVRNCRFINNKAISSTGLGHAGAGCVRNGSSYYNCIFINNSADWGAALTYHASGNLNNCTLINNTATKYGGAVAIMMNYLNFMNLNITNSIFKGNKAPLGGAVKLDGLNIKIEESTFDDNYASEYGGAVNINATNVKIINSKFNRNIANIDGGAVFIKGKDTTVKNSKFISNEAIPDVKKLNDGLGGAIYVNSTKVLAQNNEFKLNTARNGSAIYFDRNGLEFKLVNNTLYQNQAWVYRLPIFAHDIYYGESENIKSVIYGGNNIADFDNLKVSNAIYNAASNNKIEIDGEHPVLGATTSGKLYQDDREYNVRVLMMVRHEDGTIVYNNSLNTNYLGAVSGKLDNLKPGKYYVTAKHFEDNYYKAIANTTVFNVLPKTDNKILKSSNGNSIAYKDTVIWTLNITNNGPNDSTGVVVYDVLPEGLIWVNDDSNGAYNPKTGVLTIGSLKVGETIVLNIMTKVNATGKIVNKANVTGNEYDINLDNNHDEKEINVPPTVDLAIIKKVNITTPNYGDSVIWTLTVSNSGPDVAHDVKVTDIFSDSLIWIEDDSLGKYNPKTGIWNIGTLNKGKTIELNIVSQVNQTGNITNNVSVTSREHDIDLSNNVANKTIFVIKSGDLSILKTVNVSDANYGEIVKWTLTAYNNGPNKVNGVTVQDILPKGLMLLNYTASKGFYDDGVWVVCCLEKGKTETLELICKVNRTGNITNIAKISGIEYDPNLDNNLDNESIIVPPASDISVIKQVDSKNPYFGDIITWIIEVTNKGPDRATNIRVTDELPEGLIFKDYVSTCGVYQNGVWFLDYLNAGDSEYLNISCHVGQLGIIVNDVSAIANEFDINLSDNHYNESINVLPVSDLSIEKFVNVSNANYKDLIKWTLIVSNNGFNDATDVVVEDILPDSLEFISANGDYEEGIWYVGDLGVGNSKTLDIVTRIIKTGDITNVAAVYCSEDDPDLSNNEAEDTVHVGPAADLSITKTVSKHAYEIGQILTYNINVNNNGPDDAVNVKVSEEFPKSLHLKSFKMSAGEFNAYSNVWSIDKLAAGGEEKLRMEFEALSEGIFKNTASVVSDTFDNDLNNNHDSALVKIIANTSDKIINDLTDNFTKSNVVKAENIKQPVYCLEKHSTANFIELLSISVIVSMIFGGGDIFRKR

SEQ ID NO: 10342 - protein, 382 aa, Methanobrevibacter gottschalkii
MKKQIAIILMILLIAAPIVQGVCASKTAFITSDNLIDEKTDTNMLNSIKNYVEEISNGEIQVIVDNEAPGPGEGWRSISVTSDVSIDIAASDAGNYIQLASAATAGNKQIIFINTGDFDLDNHSNFLRRAWDDNYSNESLAGVRDPGTLLNNAGIQYIQLAKDYPDNIDNNGLLDKYDDKMNHEIAEKIVNIVNNYDNSSTKELSDNLIVKNKISPKGMADASKMLVESGDKEMNGPYGSYSTPQLLYQTSTYLNGDGIDIPKDYKKPDNPLGISFLTKDTYSVYDYFKMAGIVKNYMDANGKAPDSIEYEGAHISYYDLTYNFAKIVQNHTDANHMGFESEYHFDKVNDSILLHILPFVLIFVVLFLAYMLMKRIKRFKRK

SEQ ID NO: 10343 - protein, 227 aa, Methanobrevibacter gottschalkii
MKRYISELIGTMVLVLFGCGSAAIAGSMLGTVGIALAFGLSIVAMAYVIGDISGCHINPAVSIGMWIDGRLETKDLVMYIVFQCIGAIIGIGLLAIIINSAPVLGGYEATGLGQNGFGSASSVGLNVFGAIIVEIILTFVFVFTVLGVTKKAENGAVAGIVIGLTLAFVHIMGIPLTGTSVNPARSIAPALFLGGQALEQVWVFILAPIIGAIIAGTLFKGLTSEDE

SEQ ID NO: 10344 - protein, 230 aa, Methanobrevibacter gottschalkii
MNFQEQIYIRKSCRKYMDDAIDMDLIHDFMESVKLLNSEINYNYEILTHEEVNVRNRWSAPYYLAIYSEKKENYLTNIGFIFQQLCLYLQSISIGTCWVGMDVPKNKSSDFVIAIAFGKSDEMTRDLSKFRRKELSKICDYEDEKLIPAQLAPSAINSQPWYFKHTNEGFDVYQVKQNILKRQVLKKWNPIDMGIALAHMYVSNEKRFEFEIKANFDSIEGHTYIGSIKI

SEQ ID NO: 10345 - protein, 225 aa, Methanobrevibacter gottschalkii
MKIVIAIGGSILLKEYDCKKFQEYSAILKDLSTEHELFVVVGGGKPAREYINVVRDLGAGEAQCDDIGIEVTRINAKLMLSALGDAAYQRVPHNFQEALEFSATGKIIVMGGTEPAHSTDAVSAILAEYIQADKLINLTSVDGMYTKDPNKFDDAELVSEITATELLNFLSDKDVKAGTYEFFDTTAVQMIKRSDLETVITNGFKPENLIKAVNGETVGTKIINE

SEQ ID NO: 10346 - protein, 262 aa, Methanobrevibacter gottschalkii
MDNLVDIGLNLMHSSFKKDRVELIEEAKKVGVNQFIITGTNVHSSQMAAEYASKYPGTLFSTSGVHPHDAKTCNGHTMFELEKIAKNDCVVAIGECGLDYNRNFSPQDLQRKWFEAQIEVAERINMPLFLHEREAHEDLYNILKRHDNVIEKSVVHCFTGTKQEAQNYIDLGCFIGVTGWICDMKRGRNLQEAVSAIPPEKLMIETDAPFLIPKNFEFKPKKNRNEPKYLPHILETIALCMGIDAEELGEQVSRNTKEFFKI

SEQ ID NO: 10347 - protein, 63 aa, Methanobrevibacter gottschalkii
MAVEPHKHCPICGTPIPLNELVCSPDCQKVWDARLAQTKRTRIILYIIIAIFLIIWAIMTFMK

SEQ ID NO: 10348 - protein, 107 aa, Methanobrevibacter gottschalkii
MILTSSNTLVNKQIVEYKGLVTGESLIGSNIYKDLFSGVRDVVGGRTSKYEEELKKARDIAFKSMEEKAENLGANAIIGLKISYDNLGGTMGNTILVTAYGTAVKCE

SEQ ID NO: 10349 - protein, 282 aa, Methanobrevibacter gottschalkii
MKFKVPEKPENLQERLICIIFGTFVGTAVYVLFLYLNIAILGWNLGLIFAPLLAGYAETMLAERMLSSDTGAISAFILFAGTTFYSFILVNPTLGANFITFGATAVILQAAFPTLINYILLVIIIGAIFYILRFVKKTLTRIYLKIKHIIYKYILKKPFEVKPKAIEYYDELRNNQEINSLGVIFMTSTDVPDKHVINLGQFQSTVILEKEPDLLDLNPKERENHTLTILKSGKDKCLIGLTDKIKAAGGNGIIDLDIQYIKIGFGGESYQISAMGMGVYIN

SEQ ID NO: 10350 - protein, 67 aa, Methanobrevibacter gottschalkii
MDKKMIVSIIGYIVALLIPIVGLVYGAILFFFKKEEPTYRKHGRLIIYFSIVIFVATLIAKLLIGGF

SEQ ID NO: 10351 - protein, 119 aa, Methanobrevibacter gottschalkii
MKENRKIGENFDVNDAEDIFDKLRNVKGKTKPKGESKFKNISYLMNEAQYLEKNGQLGEAVELYKQIIFILPDSIKAYEAIANIYQKQGDIDSEKEILKKAISNCKENDEFKKRLNEIT

SEQ ID NO: 10352 - protein, 269 aa, Methanobrevibacter gottschalkii
MFTIEYFVGLILIGIFAGFASGLLGVGGGFLITPLQFFLLKYIGVAPDLAILISFGTSLAIIIPTSLSGAYRHTKSMDNILKPGIRLGIFGVIGGFVGGFVASALPSRTLEIIFGLLLLFIAFNNIVNINKEREKARIPFNWTSIGLIGLLVGFSSGLLGVGGGIFLIAILTALLGFSMIEAIGTSSIFISLTAIGGFLSYMITGWGVSTFPYSIGYVNIINLVLIACFSVPMASFGAKMAHRVPQKKLKIIFSIVILYMALKMLGVLP

SEQ ID NO: 10353 - protein, 352 aa, Methanobrevibacter gottschalkii
MKVNKTILVGFLFLLIGAFIFVSDLLNPLIRPVTHLFLMGSSKGKDIIFFGLLGLLLILSQVIPRKIDATRYLKISIVIGFVLLVFGNLLEVVFRLQMGIKLNTVFCSMSSTMSSTSILHTHLLKSILGEVLTKIIGPFIQSNINTGVGLYAYVPDISFLVVLIIPILFITLILANQKRPWFTNFLIAFFSSCLLIGSFDGGLWATPSLVGLLGLWIVYRNGYYLNLHLGKIIKDKKLLKANENIQPSYRNIGLSEAKYLFNRFLPILIILIVIALRFTVAFAGAEPDYYTVEIVNMTDNVDFGDIPIEKISNETYHVDSNYNEMELINDLKVPLNNSCKYYTVSWNAYSYL

SEQ ID NO: 10354 - protein, 343 aa, Methanobrevibacter gottschalkii
MLNSIFKYSYGVIVCLIIAIPSLILGNLFPVIGGPIIAIILGMLIAFAWHEKESFDEGISFTSKYVLQTAVVLLGFGLNLNIILKTGIQSLPIIIATISVALIVAFIMQKILNIEEKSAILIGVGSSICGGSAIAATAPVINADEEQVAQSISVIFFFNVLAAIIFPFLGKIIGFSTVDGGPFGLFAGTAINDTSSVTAAAATWDNMWGLGSQTLDKASTVKLTRTLAIIPITLALSVFTSKKSEYVGGEFSLKKAFPMFILYFVIASVITTLAVSLGVDANVFLPFKELSKFFIILAMAAIGLHTDIVKLVKSGTKPIILGATCWIAIIIVSISIQFTLGII

SEQ ID NO: 10355 - protein, 295 aa, Methanobrevibacter gottschalkii
MKKIYFILPILAGIMFGSGGVFVRTLMVNGIDSTTLLFLRFSIAIIPIMIAILVTDKSLLKIDLIDISLFLVCGICIVGLNLCYNESMGNIPLSLAAVLLSLAPIYVIIIAYFTFKEKITRKKIICMALAIFGCILMTGVLETSLSNIPFYGITAGIGAGLFWAIYLMASKKSIENGKHTFTILIYSITIISMGLLPFTNFGQITNFISINPILVIIFLIMHSTFSFALPYIFSTVSLEHIDSGIASILLSGAEPFAALIFGLIFYSEIPTFLMFCGFILTIIAMMALSRKEEIK

SEQ ID NO: 10356 - protein, 631 aa, Methanobrevibacter gottschalkii
MILSIIIPTYNEEKYLPILLESIKKQSFEDYEIIVADANSTDNTRNIAQEYGCIIVDGGLPAIGRNNGANVAKGDILLFLDSDLKLTDEYLRDVVYEFKMERLGIAITRMEPLSNKVEDKLFHDFANFFMVSVENIKPHGAGCYGIISKRKLHEECNGFDESLTFGEDTDYIERLAKKERFRVLRKAKIGVSTRRLEEEGITTLIRQYGKSTVNDFLGKRTDANELNYKFDHGHDRIAESKMSGIEKSAEKINVIKETYDESKEKVNKARSLLNTKTERDKKIVFYCVCGEGMGHAIRTGVIVDKIKDEYDVYLFSSDRAYEYLKSKFNNVYKIGGFNTVYINNKVNNLKTLSNALKRNPGNIKTGYETLYKKARELRPDVIVTDFEIYATMVSKLLNIPLISLDNIHMITQTKIDYPKDKYVEMVKAKGVIKTYVVKPKVHILTSFFYPKLKPKKNAIIYPPIIREDILNLKPSKGDHVIVYQTSKESGKLVRKLKSLNNEKFIVYGFNKNEIDGNLTYKEFNEDVFYDDLASSKAVICNGGFTFISEAIHLKKPIYSVPAIGNFEQTLNGYYVQKLGYGEYHEVMNASKVKKFLSRLSKYQKRLDKVKKTNNDGIVRELKYRIEKYSKQ

SEQ ID NO: 10357 - protein, 484 aa, Methanobrevibacter gottschalkii
MLSKKLILITVLLGLLAISTVSAADNTESDIIGADGLNSTSNIPMDAPRTFTQLNEAITPYTSIDLEHDYRYDNETDSEFANGVPITKNITIDGKGHTLDGNYLARIFIIKEDCTAVFKNINFINGKASTNGGAIYGVCNAENCNFLNNTAVKDGGAIHLSNANNCNFINNYVLNGRGGAMYKGYATNCIFTDNSAVTGGALFENSATKCKFTNNFAKENGGALYGGFAVQCNFNKNSAKNNGGALYKGSAHYCNFSDNYAVNHGGGMYGGAGEYCFFKNNAAKSGHDAYRSSLKKTKTTIYIKPTTTAHYGDYVVITLKNIKNKVVSGVKVSVFINGKKYATKITNKYGQIKIDTRNGFVIKKYTIKSKFAEDSNYYASSKTVKITIKKSTPKITANSKTFKKSTKIKKYSITLKTKQGKIMKNKKITLNVNHRYYYATTNYKGIATFKITKLLYKGKFTATTGYAGSKYYNALTKKSTIIVR

SEQ ID NO: 10358 - protein, 98 aa, Methanobrevibacter gottschalkii
MIIVQAKAIPKDETSKNRIIEFAQDLIKKSKEESGNIDYNLFVNTDDNTLLFVEQWDSVEILKNHLKTEHFIKFGENISDLVVSDLEINVFDANSISL

SEQ ID NO: 10359 - protein, 358 aa, Methanobrevibacter gottschalkii
MATFKGFAMKKLNETGWVEKEVPECGPLDAIIKPTCVSPCTSDIHTVWEGAIGDRKDMILGHEAVGEVVEVGKLVQNFKPGDKVIVPAITPDWDDEAAQRGFPSQTMEPLGGWKFSNFKDGVFGERFHVNLADANLAHMPDGLSDEGACMLVDMWSTGMMGSENADIPLGGSVLVIGIGAVGLSAIAGAKLLGAGRLFAAGTRPISVKVAKKYGATDIINYKEGPIDEQVMELTDGAGVDSVVIAGGNLENTWKEAISSAKAGGTVSNVNYLSGADNVLIPRVEWGCGMSNINIKNGLCPGGRVRMERLADLALCGRQDPELLVTHKFEGLDKIEDALYLMKEKPKDLIKPVVMLDLD

SEQ ID NO: 10360 - protein, 86 aa, Methanobrevibacter gottschalkii
MDDETLKKFAYVNISSYRVKTMKALKDDVKTPTNIAKEAGILPNHISKVLRELKESGIAECINEEARKGRLYRLTDVGEEIVDKLD

SEQ ID NO: 10361 - protein, 311 aa, Methanobrevibacter gottschalkii
MAKAQEEELKEPTVCPECGSTELIGDYERAEVVCSRCGLVIDENLVDMGPEWRAFDHEQRDKRTRVGAPITYTIHDKGLSTMIDWRNKDIYGRDIPARNRAQWYRLRKWQRKIRISGATERNLAFALSELDRDSSRLGLPRSVREAASVVYRSAVDNKLIRGRSIEGVVAASLYAACRRCNVPRTLDEIAEVSRVTKKEVGRTYRFLTRELNIKLPPTSPVDYVPRFASELGLSGEAQSKAIEIIEKAMEKGLTSGRGPTGVAAAALYIASVLLGDRKTQRDVAEIAGVTEVTIRNRYKELTEQLEMGVTL

SEQ ID NO: 10362 - protein, 100 aa, Methanobrevibacter gottschalkii
MKLLGKSLHIANSGKLIARTTKTPSPGAIVFDSNKKKIGKVGYVFGPTANPYVSIRLFRQANREEIERNCGEKLFVSKPKSKKTRKRRMRSRQKKPQNKK

SEQ ID NO: 10363 - protein, 247 aa, Methanobrevibacter gottschalkii
MSISPKDLLNKNKNLNKRLDISEICLDNVTINDLKFNGDNYDEYINLHSLLENISTCQVSDAFNGISRQSGVIQKIKPINNRRVFGRIFTAETTSGDWGTSAMAIDEADEGDILFFKVDSEEMAIWGELASTCARDNGIKATVIYGSARDLDALLYMDYPVFASNYCPNAGLALGLGSLNESLDIEGFKVNPGDFLIGDECGIVVIPQELFVKTMFASLDIKIKESLIIDKIALGNTLSQIVGLGKK

SEQ ID NO: 10364 - protein, 419 aa, Methanobrevibacter gottschalkii
MGKGEELTTTKYLIHAQITANGIVEKPDVVGAVFGQTEGLLSNDLDLRELQRTGRIGRIQVNIHSNSGRAKGEIVIPSSLDRVETAILAASLETINRVGPCEAEIQTTKVEDVRAVKREQVVNRAKEIYKNMVESVGPTSIKMIEEVREAMRVHEISEYGEDRLPAGPAIHSSDAIIVVEGRSDVLNLLKYGIKNTVAVEGVSVPHSIGELSKKRTTTAFVDGDRGGELILKELLQIGDVDFITRAPKGKEVEDLEKDEVLVALRDKVPTAQFLATTNILNENPKKEHIKNRNNNRNNTKYDKKQKYNNNRREEQHVVDEPVIEDDEVSLMKDMLREFEGTGVGAILDEALNMTKEVEVENIYEEIKNIEGTADAVIFDGVISQRLVDAASEKGIKKLVAFKSVNIVKKPHNVKIITIN

SEQ ID NO: 10365 - protein, 203 aa, Methanobrevibacter gottschalkii
MNINIENYYSTRKNVFERIQDAGTATKVLMSLMMACFTGIMAQIIIPLPWTPVPVTAQTFAVLCSGLLLGKKYGCLSQILYVVLGVAFIPWFGGMTGGFETLLGSTGGFLIGFIIASCFIGTITEKYADARNFKKMAAVIGIANFSLIYIPGLLGLALWLNLTQGTSVGIVDLLMMGLVPFIAGDIVKILGAASVSKVFLPKE

SEQ ID NO: 10366 - protein, 132 aa, Methanobrevibacter gottschalkii
MKLILRGHHLLCLKGFQGYGYDEKFTKNMTDINSKRKSPETVIKLTNSPDDICKACPNLRNNICENEAQNDKIVLMDDQVLEKLDSSKEYNSVELFKRIEHIFNTKESVCEICFNCIWHEKCLFYQKIGKRI

SEQ ID NO: 10367 - protein, 269 aa, Methanobrevibacter gottschalkii
MKEKVNLSGVSETMLVPLYSRALESNRKNPAFYDKTAIGIVKNLDYNFKERFKESKNKMNFWGCAARTIILDDEVSKYIKNNPECSVVNLACGLDDRFSRVDNGKINWYNIDFENIISLRDKLIDKKDRVTDIPTSALDFCWIDKIENKDNVLIIAEGFLMYLSEEDVKNLFFKISESFGKVELLLELMTHWMVKNQKKHDTVKQTGAVFRWGINETEDFEMICPMFKMTGDYNLTNVMKRYSPIFITIASPFLKPRNNRIGKFEKLIL

SEQ ID NO: 10368 - protein, 74 aa, Methanobrevibacter gottschalkii
MFNSKFLILIIGVLIIGLALSCYFYSSDNFHESDSSLNERHDDVVYLWMLDDNGKLKLVPTTETYSEGSASDPD

SEQ ID NO: 10369 - protein, 762 aa, Methanobrevibacter gottschalkii
MENKINAGYGSTITLENDYEYEESGYSSGIEITQDITIDGKGHTIDAKGQTRIFDVEAGKVTLKNITFKNGMQNFFFGGGAILWKSLDGIITNCTFINNYAPSGGAIRLEAWDNTISDCTFIRNTANQGGAINLNTTNYASISNCVFVNNDIYSVQGDGCKINNNIFMSCSIGFDFTRNYNIDNNWFGNNASNYTYKPNEFCNNWLFLNATTDPNTVSVSNTADIIFKLYAYNSTSGNISKYDNAPFKNLNLTITATNGNIDKNIAKLGETIKYTASSVGTGNVSAKVENVEYTIGLDIIPIETKLILNSTDTIIDSISTVGINVTDINNNPLSGVVKLTIKDNKGNEYNTTVTVKTGITTYIYPADKTNISKIVNITGFYLGNDTLGYVDSPVAETKFRVDKLNATVNLVVNNYTIRNFSVNITVTGKNTDRIVENGSLIIYANREKIDEINITDGKAENILLNITKIGNYELSVAYSGNNVFNENNTFSKNVTAIKISTIISANNIITTYNTDKYLEITLLDSEKNPLNNATLSVDLNGAKKYTTYKNGQIKIALGSLVPKTYTAKVSFAGNDIYSPYSTSFKVVVEKATPTITAKTKIFKFEDKTKKYTITLKNNKGIVMKNTKVTLTINGKTYTATTNTNGVATFKFNKLNKKGTYTASITYSGDKYYNKLIKKAKIKIKAPAWKTVAKGSKNKAIVKKIQKTLKNNGYYLKYNGRYLKIDGIFQKYTQIAVKHFQKANKLKTTGKVDYKTAKKLKII

SEQ ID NO: 10370 - protein, 48 aa, Methanobrevibacter gottschalkii
MKEINIVEIIKNKDKLEKHEGYLPIPILHWIDIGKWEIFLEKHDKKLY

SEQ ID NO: 10371 - protein, 47 aa, Methanobrevibacter gottschalkii
MKLFKTEITVLGNENTKGLALNGRCSHGKFQDMLENMNYYLEKIHNI

SEQ ID NO: 10372 - protein, 394 aa, Methanobrevibacter gottschalkii
MEKLLLIGIDTRSMINSALQLDFELFSTSYFSTSDTPTIKNQKIILKEKYGESCGAFENQFSNLDILEFSKDYLDEVDYIIPISGVSPSDFSKRHKRKILGTTNVCDIENKFKFFKKIKNEFLTPMTFKLSDVDEAIEIDKSYPNSQFILKPVKGSGGYNINLLNNVSDFQFNDSEFILQEYVTGINVSSSILSTAHAAKTIMNSRLLTLNDFGKQDNFIYAGNILPLTNESVMAEFNGIDDIIKEMNETSENLALEFNLLGSNGVDYIINEKGLYVIELNPRLQGTFECVEKTLGINMLDAHIKACRGELVDIPEPKCYSYKKIIYSPTRMKYEKINLDNIYDLPHIGSITEKSEPLLTIIDSDKDFKKLYEKVELASELINKKAKLHQSDIK

SEQ ID NO: 10373 - protein, 77 aa, Methanobrevibacter gottschalkii
MFIFKISYYNLFTVINFFTRNFLKNGANMKRNPIDQFMKDPDNKAKIFIWMTRAMIITTFMITIGVILFILYLIGVI

SEQ ID NO: 10374 - protein, 227 aa, Methanobrevibacter gottschalkii
MAQDIIDGINPTRMELLSLKNRTKLAIKGHGLLKEKRDALIKEFFDILDRVKGIRENAEQSLKEANDALLEAQIAMGDLAVRKAALSVKESIDVEITSRSVMGVAVPVTNVKMEERSIIDRGYGFSDTTIQLDEAAKKFEESLKYLIELGEVEKTIFLLAEEIEATKRRVNALEHIMIPRFQNTEKYIDMRLQEMERENFVRLKMIRSTIEKNEKAAAEAAAAENAE

SEQ ID NO: 10375 - protein, 463 aa, Methanobrevibacter gottschalkii
MNTNIKTREYTTVSEVSGPLMVVEGVEGVGYNEIVDIETPTGEKRSGQVLEVTKDVAVIQVFEGTTDLNTKDTKTRFTGQTAKIGVSRDMMGRIFNGIGKPIDGGPEIIPDEELDINGAPMNPASREFPEEFIQTGISTIDGMNTLVRGQKLPIFSGSGLPHNDLAVQIARQAKVLGADDEFAVIFAAMGITNEEANFFMRDFERTGALEKLTVFMNLADDPAIERILTPKMALTTAEYYAFTLGMQVLVILTDMTNYCEALREISAAREEVPGRRGYPGYMYTDLAGIYERAGRIDGKEGSITQMPILVMPQDDITHPIPDLTGYITEGQIVLSRELSRKGIYPPVDVLPSLSRLMSGGIGGDKTRDDHSGVSDQLYSAYAEGRELRDLVAVVGEEALTERDQKFLEFAQAFEDQFITQSKDEDRSIFESLDLGWNLLKILPKSELKRVKEEFIEQYLPKDE

SEQ ID NO: 10376 - protein, 580 aa, Methanobrevibacter gottschalkii
MIIEGNIIKIAGPVIVADGMRGAQMLEMVRVGNEKLIGEIIELEGDTATIQVYEETAGIQPGEVVECTGGALSVELGPGVMSSIFDGIQRPLRIIREASGDFIARGIDVDSINKEKKWEFKPVAKVGDVLKAGDVLGEVQETSAVLHKIMVPPALEGEVTEIAAEGEYTILEDIAEVGGQKVQMLQKWPVKKSRPYVRKLDPDVPLVTGQRAQDTFFSVAKGGAAAIPGPFGSGKTVTQQQLAKWADADIVVYIGCGERGNEMTEVLTEFPFLDDPKTGNPLMDRTVLIANTSNMPVAAREACVYTGITIAEYYRDQGYDVALMADSTSRWAEAMREISGRLEEMPGEEGYPAYLASRLAQFYERAGRVETIGSEPHVASISVVGAVSPPGGDLSEPVTQNTLRICKVFWALDASLADKRHFPSIDWLQSYSLYVDSIEGWWADNVAADWRATRDQAMGLLQKESELQEIVQLVGPDALPETDQATLETTRMLREDFLQQNAFDDVDTYCAPTKQYQMLKTILLFYKESLAAVNRGAPIATIAALPVKEEIGKMKYIPQDEFDAKIADIQAAVVKQCSEA

SEQ ID NO: 10377 - protein, 105 aa, Methanobrevibacter gottschalkii
MSSVAVIGDIDTVSGFRLGGVKQAVVVKTSEEAIAAFDKFLEDEISIIIITQLMANEIREHINRKIGSSVLPMIIEIPGKDGSSEGSSDQINDLIRRVIGVEMVK

SEQ ID NO: 10378 - protein, 384 aa, Methanobrevibacter gottschalkii
MADQIATLISSVGLTQETFLVLCVISLLVVGAVVVIITSRPILDIYPYLNPSARVRARKGRLFDEKQISEIVETSNIEEVENYLKGVPEYADVLDEYPLDKALDVERANTYEFIARLAPKDIKAPFAVMSKKADIDNIKSLLTAKEVGYDADETKELLIPCGALYNDLESLADAENVTDIVTSLDNTEYAAVLEDALPQYENTNMILPLESALDKYYLGKLLRSTDVPSDENKQILYAYVGTQVDVTNLKLIIRAKEDGLDYDAISPYILDEGYQLREWKLKDLMESPDVTNVVSGLEGTKYSSALTDVVPVYNETGSVAVFEKALDVYASEYSKSLASKKPLGIGPIIGYLSQKENEIKNLKIIARAKREVDFPNAKIMEMLI

SEQ ID NO: 10379 - protein, 203 aa, Methanobrevibacter gottschalkii
MSSGTDKIVSSIMSEAQEKADVIIQEVNAEVSAIQAKADKTAEVEKTRILENGKKQSDMRYQQIISEAKMNARRAKLGAKEEVIEAAFSQAVGELKEKASSRSADYEDSLIKMIKEAADEIGGDDLIIQLNEADTNQFKSEISSGNAFEIEGIKFELGEPINTIGGAVLKTNNGDIEVNNTIEARLDRFKSILRSEVANVLFK

SEQ ID NO: 10380 - protein, 161 aa, Methanobrevibacter gottschalkii
MVEIALGTALAAIGAGVAIGFAGLGSGLGQGMAAAGSVGAVAEDNDMFARGIIFSALPETQAIYGFLVAILLLVFSGLLGGGQGLPTEAGIVAIGVGASIGFAGLGSGMGQGMAAASSVGAIVEDNDMFARGIIFSALPETQAIYGFLIAILLMVFGGILG

SEQ ID NO: 10381 - protein, 666 aa, Methanobrevibacter gottschalkii
MFKTARMRKIRIVTLDKYVAPTVDALHESGLIQVSDISESIQQDPELAELVTPSKATPYTGKLSSLLMKTNGISELLGNSISEGHGLKDTLMSFISPDMPVQKEVEKLDTPAFIEKAEETLAKVESKTSVIEGKLAALDSETSELKSNKSLAKRLSHFDMDLALLKDSKYTSTTVGRINAESTSEIKNELSNLTDELEIFTVPMDDDDGEVIAVVTLKEFSDDVYSTLRKFDFEKIEVANVEGTPQHIISSADSRLLTIESERAAVKKELRAVAEQWDDEILALKEQLENEKDKNEILSSFVQTKDAYVLEAWVPVKDTEEVEQLVEKSSEGHCAFETIEIEGTDDEDVPILQQNGWYAKPFEFLVDMYSPVRYNEIDPTIFVAITFPFFFGFCLTDAIYGLVVSAIGVVIIRGLGKVKESMRSFGWILVWAGLWAVILGLLTNGFIGDFPERIAGFRLPTVFAPVEAFKHPDTILLIAIGVGLLYTNVGFLLGAIDNLRYGNVKEAIGSQLCWFVFEAGIILLALGYMMPAIGMVGMALGGILIIATIGMLVWANGAYGVMDIFGYMGDVLSYARLLALCLATGGIAMTVNILAQMLNNMVPHVGIVLAIFVFIFGHIANFAFQVLGAFINSLRLNYVEFFSQFFMSGKGKFEAFKANRTFTKLK

SEQ ID NO: 10382 - protein, 104 aa, Methanobrevibacter gottschalkii
MAEISDAIAMIKKAESDAEQLIADSQAQSKDMIADANLKAEESVSEVKISAEEEAQKTVFDAEDKAKKEAQSISEQSKVEVKSLKDKAMGNVDEAASIIVKNIL

SEQ ID NO: 10383 - protein, 116 aa, Methanobrevibacter gottschalkii
MANIKMFKLLGVLVSLLLIIWGILPFLRHQPITTDVIATAIILIMIAVAYMIIMFNPSWTKAVFFFEGIIIAVAGYMLLAFPYNLEFALVGVIIIAIAILAYLQKLPPKILRLFYR

SEQ ID NO: 10384 - protein, 109 aa, Methanobrevibacter gottschalkii
MERAVWIILNNNFSLTLDSEIKDEKIVNKRFSPGSDLWTSELPQLSFSDENIQKDYDEFISDIISLFSEPSVDKIFIDAKIGEESEYVNAKNPLVIRKIEEYSVDEIIG

SEQ ID NO: 10385 - protein, 112 aa, Methanobrevibacter gottschalkii
MKLFILSANDSRDMDDISQKLSLKKFKITQTENNYILMCKKRYGNILIHAICLIIALSYVWPVLIVNVIYFTYSYLWASPNVLITTESLDDEGNPLEFSSMDEILKKATAIL

SEQ ID NO: 10386 - protein, 169 aa, Methanobrevibacter gottschalkii
MEFIDVINERYSVRGYLDKEVEQEKLEFVLKAATIAPTGVNNQPFKVYVIDSKKYKEKLSKIYKAKWFVEAPYVLAVVALRNEAWVRPWDSKNIADIDATIVMDHMILAATDVGLGTCYVGAFKKNYAHKFLGLNENEEVVLFTPLGYGNVEPRETPRKDLNDFVVYKD

SEQ ID NO: 10387 - protein, 267 aa, Methanobrevibacter gottschalkii
MQENNFKIDRHSLKTAISRVETDKIVTRGYNQRDLIEKIRYSDMVFLLLKGRLPSIIEGKIFNHVLVSFCDHGVTPPSTQTARIVTSSGSPVNSAVAGALLSFGHKHAGAIEKTMDLYQSKINSLYLTDDAEIDNKQIAGLAIEIYQEYILKDKKVPGFGHRYHNIDPRADKLMEIVIKEGFIGPHIKLALALEDLIYQKKQIRLNVDGANAAILSDLGFTPDLGLGIFIIGRIPGIIAHIHEEKMNEDEFRRFCDLDDVIYQQRGK

SEQ ID NO: 10388 - protein, 290 aa, Methanobrevibacter gottschalkii
MDILEDISKTIIDASTTLSQDKFNALKRSIDAEDNENAKWALEQILENYKVAQDIKFPLCDDTGIPHVIIEIGEDREISGDLLNQIHKGIELGLNNLPARPMAVIGDEVQRIEQSKGLFEKPGMLRPVSILIDTANDESTYKRDISSDTLNIHFLLEGGGPEIRANTFRVYHKRSFDNVINTACGWLEESLRMLGCTPSIPSIGIGRTHFESTSLLLKSIAYGNLDNQSEHEQKITQRLNETCIGPMGFGGKTTVLGTYLNIGNQRASGVRIVSVRPSCFVEPRVATLKL

SEQ ID NO: 10389 - protein, 300 aa, Methanobrevibacter gottschalkii
MENTKKFLKKIGIKEVYDDFKSDKRFDDGGQYRFEVPGIQSPKTMEALLTESIKQGIFIHRVTQTKGIMMLTDEEIGKMIDLAIDYGCELFLAVGPRATYDTSATVHTKEGSRIGYRLRGYDNLVYAIEDVKRACRLGVRGILLYDEGLLWALNQMRAEGEIPENVHFKLSAHAGHSNPASAKLLEAQGLNSLNPVRDLQISMLAAIRYACSMAIDLHTENPKSTGGFIRHYEVPKFIKVASPVYLKTGGSVAANHNWDTTEKEALARIKQVSLVKRIIDEYYPDAIVSPVKSSDLSIPE

SEQ ID NO: 10390 - protein, 468 aa, Methanobrevibacter gottschalkii
MFLQNISKFISNYRYEQATVESLTTVKAAFLDFFGVTYRGMSEEAPSIALNTIEEILPKRNSNLTASIIGQNFKTDILSAAFVNGIAAHVLELDDGHRGAQLHLGAVIFSTALAISEAYDLTGREFLEGVIVGYEVGILLGQLVNPKHRNKGFHTTGTIGTFIAGVVASKLLKLDEKQTLNALGLCGTQAAGLLESDHGGSMGKVLHVGKASYNGILSAFLARNGFTGSGTIFDGDEGFLKTMVLDNTNHDIDEFSFENALKNIGKVRVRDIYFKKYPFCRHLHSSIDTALKLKASIGDEYNHIQNVAVKTYEIAAEHNNFHPKNLEELKQSLPYAVAISLVVGEVSVDKINQLIEFGLLENYSTVDDVNAIKNIVNGMIILSDDKLNELYPSKRPSNVIIKLDDVFRNGIFQNITFLPKGDFENPLQLRELIDKFKGLNPHYDIKNLTVIDSLEDYNMKYVVRKLKG

SEQ ID NO: 10391 - protein, 162 aa, Methanobrevibacter gottschalkii
MVDIIDGSENISVHGILNWVLLLTIFSIITVVGNYIGYKHPIGDALIGMFLLSLITLIGVWMERYLPLDISSIIYISIIGIVLAFPGMPTSKTLLYYVSQVELISIVTVFLAYVGIGMGKSWDEFKALGPKAVIITILVIASTYLGLALVAQVILMLTGVQI

SEQ ID NO: 10392 - protein, 298 aa, Methanobrevibacter gottschalkii
MSIISKRNNDTEDIRHIYRDKTDRRILKKNPWKDYGLHISVLILVVIAELIGPMKIPVAKGVEISIMPLLYTMILGLIFYLAKPITWIQRKQSRVAEGAMMLFIGVLIAKLAVSSGQSIHLIFEMGPALMLQELGHLATILIALPIALLLGFKREAIGMTSSIGREPEVAVVVDKYGFNSPESRGIFALFIVGTIIGTVFISFLTSICVSVIPLHPYAFAMASGVGSASMNAASLAPTVAAFPQLATQIEAFAGFSNLLSFSVGIYIVIFVAIPLTEKLYGILEPKIGRDPIVDEEEG

SEQ ID NO: 10393 - protein, 422 aa, Methanobrevibacter gottschalkii
MIIINILHIGIDDTDSPDGMCTTYLASQIINKFEENGINLVDYPRLIRLNPFARFKTRGNGGVSFRIPKDDNVDLAKKIVLEEVEKLSMFDCDNTNPGVIFYDGEITEEMENYAFRAIYKFITIEEAEKLAKSVGCEIHKFKKGRGIIGSVAAISLPLKDYTFELLTYRASENYGTKRQIDYDSVYKMDKETFPDTFENIDYSEEYIAIEPKTPCPVLYGIRSNNVESLKIAKDIVQVSEPIADWCIFKTNQHTDMHIQKVSNISSMEQFGCYEIIGEVKNKPKIIDGGHMFFYISDDSGEIECGAYEPTKNFRKLISHLRPGDIIKVFGGIGEQNTFNIEKFQVVKLNDTEYKNPICECGKRMTSAGKNKGFKCKKCGNKIQSDKKVPIKVTRFLKNAQFYETPVSARRHLSKPICRMYLD

SEQ ID NO: 10394 - protein, 310 aa, Methanobrevibacter gottschalkii
MLTRGNLLQQTEKLLKSQGFKTSDIYEHGSFDIVARKNLLILLLKTFLNIDSINEQNAHEMNQLANIFLASPIIIGEKSRNGILEEGVIYERYDIPTIGFETFKNMILYNEYPEILADRGGYFVKIDGNVIKQYREEYSMSLKDLANLAHVSRATMYKYENGIVRANTETAMILEEILNTKVTLDIDLLKQPQKDKIEYSDDVKDLSKLGYGVLSTNKSPFDAVAKMKTSDKHSPLMANVEKNRTEKTLKRMAIPLKDLSLVTTSEPVFIINNDKIKESIGKIPVIKSWELKEFENSKELLKMIRERKEN

SEQ ID NO: 10395 - protein, 128 aa, Methanobrevibacter gottschalkii
MENLQITKMENHPIKWICNFKGQTAIGICGKTQKIAMFASDDRVSKILDDIVIGTDESQEGYGCEEKNRCCNFDCELCEISPRQYLQITGKKPSNKNIKDLINGLADLNNSLEEKNLVPFEEYEVVNF

SEQ ID NO: 10396 - protein, 264 aa, Methanobrevibacter gottschalkii
MFFDDLTFKEKIIPKTILGYSPFVAEPFLGHRSMLYKRDLYDNPQAIADVIVESYNQGVRAINLFNDSQLLKAYDIACDQGCNMKVIATIGKTEVDYLNPNYEIAKETDWDDDIELFNSYDCPLMLVDEFIVDAYDWRLTSKILDCINDTDSLSGLITAFPLRTTNLIPENLNMDLFDFYMVPFNAISYMMDITAFNASQREEFKQKLTSLNKKVIASRIFACGILKPKEAFEFYKKIDYIDLISIGVAKVEEAREDFTLLKEY

SEQ ID NO: 10397 - protein, 112 aa, Methanobrevibacter gottschalkii
MVSMEEFPISSANFISGYKIVENKGFVYGLTVRARGIGGDIGAGLKGLLGGEIKQYVTMMEDSREESIQRCIEHAKELGANAIISVRMDSDSISQNMQEVLTYGTAVIIEKE

SEQ ID NO: 10398 - protein, 524 aa, Methanobrevibacter gottschalkii
MKVLIADAINEKGIENLKEVADVVVNTSITPDELADTIHEYNGIVVRSRTKLTADIIEKADNLQIIARAGVGVDNIDLNAATEKGIMVVNSPESTSVTVAEHTMGLILSMARKISIADKSVKEGKWEKKKFMGVELRNKTLGVIGMGRIGSQVVNRCKAFGMDAMAYDPYLPEEVAKQMCVDLTDLETVLKNADFITIHVPLTPETKHSISTEQFEIMKDTAFIVNCARGGIIDEKALYDALVNDKIGGAALDVYEEEPPAEDSKLFELDNIVLTPHIAASTKEAQRDAAIIVADEIIDLANGNTPKNVLNLPRIDKNTYNELSPYMELCEKLGCFVSQGINGKLKEIEIIYSGELSEIDNLEILSRTVIQGAVNPFLSSPVNAVNAALVAKDRGISITEGRKNNSKGYESLIKVIAKSENETFTAEGTQLHESRILKVNDYWVDVIPKGHMFIAKYEDVPGSIGKIGTKLGEHNVNIGIMQVGRDEKGGRAIMVLTLDKEVPKEVISEIQALDNVYEATGIEL

SEQ ID NO: 10399 - protein, 226 aa, Methanobrevibacter gottschalkii
MSFISKLFGNNDDEFEEVRVDREVLNSVIYYSKQAYPNEFLAFLDGKIKNRILYITGLIFIPGETCETGAVIHSEMVPMNTKYFGSVHSHPGPSASPSDADLMTFSKNGYFHMIVCLPYSYNTFKAYDRHGESIDYIVGDYAYLVNDDLDEFFDEDDVLTDNDEFKPGFFDEDDDEFFKNLDEEKVNHYDEFEKRNQINNQLPNNVIKIELNNDGNVKKISRRFKD

SEQ ID NO: 10400 - protein, 240 aa, Methanobrevibacter gottschalkii
MKEYEVYSSLKVPINSKIIVRLDGRNFHQLARDLNLIKPYDENFYKVLSKVCEDLFKEFSPIFIYAFSDEISLLLDNIPFNGRIEKIDSVMASFASSSFVINYNAKFKKPPSFDSRVIPISDDDVLEYFKWRQDESWRNCVNSHGIFHLRSNYPENLSNNKIKGMNLSDIHELLFQNGINLNDIDTYKKRGIGVYRKNKKVVGFNKKENKKQISYRSYVCTDWNLPKFNKEFFKNMGVLK

SEQ ID NO: 10401 - protein, 254 aa, Methanobrevibacter gottschalkii
MKVGIIGCGAIANIITGSIAPENNGIEIAYFFDKDVERAENLASLAGGVAVLNFDDMLNDVDLVLECASPDSVKKYAPIILKKGIDMITMSIGAFMDKDFYNEVLKIARENNAKIHLPSGAVVGLDGIKAVAKFGLKEINLVTRKSPRSLGKNIDIEEVLFEGKASEAVKQFPLNINVAATISMACNRDIDVKIIVDPKVDRNVHEITAKGDFGEFKTTTMNFPCEANPKTSMLAALSAIRLLKSFNETISVGM

SEQ ID NO: 10402 - protein, 133 aa, Methanobrevibacter gottschalkii
MVEVSKLRSLDIYTNTGHYVGRVEDVVLNIRLGTISKLQVRAIEQERKPAGVLNSFLGSIRGEVPEENDMKSFQNDLLTVDFDKVQAIGDIMLINPRDIKKINPEPQVPDAVAPKQPETQPQETQVQFDAERL

SEQ ID NO: 10403 - protein, 240 aa, Methanobrevibacter gottschalkii
MWDTTKDYRILVASKARENYLNLIPTASFRGSWNKKQAIDLGKQMNSDFQSLIYSYLEGEELVNSPDVASLKEKGEKIIEYLGGPDWNKKFLSNAPKEDREKTQENIAKVRFFLDTIIGLKDRLSLGPINDPIIGVDIRVGEVMSVTKHPKNDKLLICNVNLGKRAITVLTNDLNVKDDNKVGVSLLPPQSFSDIVSEGMFLGMNGNILKSVEGELGEMPKGIPMESLNETRNLVENYLK

SEQ ID NO: 10404 - protein, 470 aa, Methanobrevibacter gottschalkii
MDMLIGGKHISSEDLEDVINPYTGEVIDTVPIAHRQTAELAIESANNARESLSEMSAFKVSNNLFNVVLKLKEKRQMFAESLTLEVGKPIIESLLEVDRSIETLKLAAEEAKRIYGESVPLDAGMGGKGFFAFTQKVPLGVVVAITPFNYPLNLTIHKIAPAIACKNTVIVKPPTEAPLTVMKFCELLNEEFPDGVVNVVTGYGSEVGDHLVVSPEVNKISFTGSVTTGLMISQKAGMKKTTLELGGNDPTVILKDADLNNAVKGIVNGAFLNAGQVCMGVKRVIVEDEIADEFAEKLVAATQKLVMGNPLDSKTTLGTLISEKAAIQVEETVNNAVSMGAKILTGGNRDGAFYEATVIDNVTTDMDLILNETFGPVAPIIRVKNVDGAIEVANNTDYGLQAGVFTGDYASAMRCAQEIETGTVFINKQSTFRTDNMPFGGFKNSGVGKEGIKYAVDEMTKTKLIGLNLR

SEQ ID NO: 10405 - protein, 193 aa, Methanobrevibacter gottschalkii
METTRFETFFDAIIAIIITVLVLKVPQPATPTIGAILKLNTIFIAYLISFLTLYNLWYANHNLLKIIDIIDNSAVWSYGAMTFILSLLPYFTLWLANDINSIPAETMFGLIFIFTHIFNRLATKSIYRSNPYNKQLIELNFDSHIQSIPLIILIIGFILTYTIYAPGIYVSCLLAVIFWISLSKIKRGCNNGN

SEQ ID NO: 10406 - protein, 190 aa, Methanobrevibacter gottschalkii
METERFEALFDAILAIIITMIVLEIPLASTGSWEALFDLKYEFLIYAVSFIVCFNFWNYNNNIFHLVNKIDYKVIWTMAITLFVFSFLPYLTSFVGENFYLFLPQFLYGLSFIITAILSMIIGNFLKQADPGNIALHIALSKHYPMYATIITVSIGMIIGYFIYPPAIIACCLLSILGVWFIPRIIFHMK

SEQ ID NO: 10407 - protein, 315 aa, Methanobrevibacter gottschalkii
MNLVFKFIEKYYCLILLFLVVIALIYPISFNWVLNSYGNLNILNLLLSIVLFTMGTTLKVDNFISVFKNPKEIIIGISSQYIIMPFLAFALASIFSLDAALTVGVILVGTVPGGTASDVITFLAKGDVALSVSLTAISTFLSPIVTPLITLVLIGNQIAFNPVDMFLSIVQIVIVPVILGLLLNYKFPSFCKILEEYLPGISAIVVCVIVAGIMGANKQAILTSSLVIMVVIITQYFLAMALGCLMGYLFGMKREHIITIAIELAFQNSGLSTSLAKTHFPNLLIATVPGALYSVWQNFAGSIIAYLLNSYFIEE

SEQ ID NO: 10408 - protein, 60 aa, Methanobrevibacter gottschalkii
MDDSAQTSAEFILLFGGIFVVVLLVIYMYNNYMDDLGGEIKSKEVNEFNNQLNALKVYFK

SEQ ID NO: 10409 - protein, 308 aa, Methanobrevibacter gottschalkii
MKFNIINNLTLFLDNNVPEKYLFKINEFLLSGSISTEASKVLSIIIIFILVTEIFLVIALTLFNLPFSILIFPFFIIPIIFTYIIVQQEKRAQEIEHTAPDFLRQLSSMLQVGLSFENAMEDMSHYSSGPLYDEIRRAIIEIRMGQNFDDAWRAMSKRLKSKELERIFGIILDGRKSGSSISTVLLDVSNDLRDLMALKRERKSAVMMSVMFLLISAIVATPFAMGMVSVYSNFMQSYGMESEMIISAPLVGEMYLIIHSFLVGFIISVIMYGEVKTGLKFSLPLVAASFGIFYIISTFGGTLFMGGF

SEQ ID NO: 10410 - protein, 338 aa, Methanobrevibacter gottschalkii
MNLHLNNILKDIKKDGVQAYLLTQFTNIEYISGYKPTSFAFCILKENPIIYVSGMDMEIANRDSTIEVKQYESYDLMIKELKEEGIKNLAIEPTLPYSTYARFKDDFEISDKSYVDKQRMIKTPSEIEKITKATEIAQKSFLQLDILNNNGTEREVAFNLVRYMIDNGASKESFETIVTSGANSSLPHAIPEAKKLERPILIDWGAIFKGYCSDNTRTIVYAESQQEIWDIVAEAHDKAIKSVKVGMKCCEVDKVARDIIAEYGYGDNYIHSTGHSLGLNIHETPGFSARDETVIEKGMVITVEPGIYLEGKFGVRLEDTVIISKKANVIGDLPLNIE

SEQ ID NO: 10411 - protein, 213 aa, Methanobrevibacter gottschalkii
MFKFTSSEIRDLIIAFIVISLSFAIVNGGRNPSAVLSILPIVMVGVGAGFILHELGHKFVSMKYGYWAEFKLWPQGLIFALVSSFLGFVFAAPGAVYTYANYMTDEINGKISIAGPVVNIILALIFLAICVAIYPSAFNSETSVLIFIICSVGYSINSFLAAFNLIPIGNLDGSKVLTWNAGIWTITIAIAGIMTVMSMTMGVETIVRIILGF

SEQ ID NO: 10412 - protein, 400 aa, Methanobrevibacter gottschalkii
MTEKLTYFEGTHRVIAPKKTIEINENKLRIAGITRIADITDLDRIGMPVFTAIRPTAEDGAISIYGGKGISKDHAKASAMMEGFERYSAEKQEADETLIATTSAITQKGKYANPKTLNLPQKYEKEDISKIPLEWNIATDLISGEEYYVPSNAVFHPYNHENNVQSLFKSNTNGLASGNILDEAILHGIFEVIERDAWSIFELTHKNYSQIKLDSIESELINTIINKFESNGIKIKLMDFTADIKIPTIAASADDTITKDAGLLTLGMGTHLDPEVAVLRALTEVAQSRATQINGAREDTVRADFAREAGYERMKRINKYYFREEEKQINFQDIENKSTTSINADLDIVKKELIANDIKQILYTNLTRPELNVSVVRVIIPEMEIYALDPTRAGYRFLRV

SEQ ID NO: 10413 - protein, 216 aa, Methanobrevibacter gottschalkii
MKIIIYTGLSIPFDEAKEILDSHDNIEVIYKKPIKRGDLGHDIKENPDIIAIIDGVFHQNSAVGHREILSVMKKGVKVYGSSSMGALRASELDTLGMEGVGYCYNEYASGNVTSDDDVAVMLDSDTLEAISVPLISMNYVFTNAVNENILTQEEKDELIRITKETYYPKRNYAQTLSKSGLNRDKKEKLINFIRTSEDIKKEDAKALLSHIKYVIE

SEQ ID NO: 10414 - protein, 336 aa, Methanobrevibacter gottschalkii
MRLEDKINIVRNILKDKNVAIGFSGGSDSTLIIYLASMFAKNTLAVTIDNHLMPTEFIEHAKRVTSSLGVKHEIIDIDFYKDPDFLKNTPKRCYTCRNLMYGEIKKVANENGFDYICDGNNISDLVDNRPGILITYANEFKTPLIEAKLTSKEIHEYLDKNNIPYSKSTTCLATRIKTNTPITKEKIENISYCEDYILSNTECETVKVRDLGSICMCEVDKIDEIINENKFKQINDELKKQGYEKVSLNLSEIKNNGEIILNYIDGSFSYKLPFTINIADTKKQLKNKIICQTKEKIEIENIDIFDTGLIKGNNFKNYEDALNKFMHVLTKLRRNI

SEQ ID NO: 10415 - protein, 152 aa, Methanobrevibacter gottschalkii
MAVNPVLVIKVVDNTSVGVRARLYDDFSEHNIVLNSVLTYWWANNMPPAVKFLELFDSVIKRTINEIMPHKTLNLKYEVKADDILENASQIEITLISISADGVGFKIDGKSVFLKDLRKVEEDFEPKEFSTTFDQCIETPDIVLKKYKEMKN

SEQ ID NO: 10416 - protein, 281 aa, Methanobrevibacter gottschalkii
MLVKRTMSKNVVSVSVPGNRDKVLDLMRKEKKAVLPVVKGDTDILVGIVTRSDLINNPDEEQIAMLMSRDLITVSPGDDVIDAARKMMDNDVRRVPVVDDDGKLVGIITSFDLVSNALTKTEINDVVENYMITTVPTTWEKAPLNVAFESMNQFGLKSILALDDDAKLSGILTETDFISEIEIISERSEHSSTVGTEGDKWSWDSTSVLYIEKNHLKFTDKTVCDVAVGNVEVANSKTKVSDCAKKMKTLNIEQIPVIGVEGNLVGLVRASDLIKALVPQE

SEQ ID NO: 10417 - protein, 140 aa, Methanobrevibacter gottschalkii
MYKKILVPTDGSEFAKKAQKHALFLAEISGAEIIAISVTENNFVNGLPLDDEVYQLNQILKERSEENLKEFDKLNENDLKITHIVREGSPAKVILEVAKEENIDLIVIGSSGKSGFDRFIMGSVADKVVNSAKCAVLVIH

SEQ ID NO: 10418 - protein, 384 aa, Methanobrevibacter gottschalkii
MFTIANGIILKGKDLVPTRENIVVDDGRIIEIGKGFLEGKIIDVDGSVVCPSFINGHMHIGDSIIKDEGYGLSLSEMVKPPNGVKHVALSDVSDDELIQAMKYSMWDMVYGGTTHFIDYREGGLKGVKLLRKASEDIPIKPIILGRDDSFYGDDPDLSKVKIAIRKLLKFADGIAPSGFGEITMDVAELISKECEKAGKISSIHVAESELNQIESLNACGLSEIEKGVINNFSQLVHLTNPKNEDLNSVSVSAQNVVVCPRANATLNVGIVPLNKMLDLGITPLLGTDNVMINSPNMLRELEFTLKIISVYYKKYIDPSNLLKMATTNICGFGINNVIDKSLITEDNLAEFNVFNSFSKNPYLNIINRCETKNILYRINRRTII

SEQ ID NO: 10419 - protein, 176 aa, Methanobrevibacter gottschalkii
MYRVKYNNKDYGEFKKLSDALYERDALFFCNFDYDLLVECDLENKYENMVLPPFPEKRPKGRIKGTKVNKKEREGEILFNHKIKKFYIQKGDETIGQYDTMTEAFYYKKILMANKWDKNILKTNITKKIEVNIIIDPAVEYEVQLNFCPKCKNRLKIGETECPSCGINIEEYLFNR

SEQ ID NO: 10420 - protein, 1058 aa, Methanobrevibacter gottschalkii
MPVDKDIKKVLIIGSGPIQIGQAAEFDYSGSQACKSLREEGIETVLVNSNPATIQTDIDMADTVYTEPLTPEVVAKIIKEENVDSILPTMGGQTGLNIATGLGDLGLLDGIKVLGSDVQTIKDVEDRDLFANLMDKIGEEIPKCHAVESVEAALEAVDDIGYPVIVRPAFTLGGTGGGIAHNEEELIEIATHGLDMSFINQVLIDESVLGWKEIEFEVMRDKEDTCIIVCTMENIDPMGIHTGDSVVVAPIQNLCDETIQKMRDASIKIIRALGIRGGCNIQFALNPETDEYKVIEVNPRVSRSSALASKATGYPIAKISSKIALGLTLDEIKNDITKETPASFEPAIDYVVIKIPRWPFDKFKGVSREVGVQMKATGEVMAIGRTFEEAFQKALRSLDMGFDGFEYIDYTEEDLAHPTDKIYFQIYSAIKDGMDIDKIREITNIDNFFLYKIRNIVNFEDSVTADKLNDEDFLRKAKQIGCSNKRLADLSGQTEEYIKNLLSRYNIKPSYKMVDTCAAEFEAKTPYYYSSYDKGNELVSTNKKKVVILGAGPIRIGQGIEFDYCCVHSSLALKEEGIETILINNNPETVSTDYDISDKLFFEPLTFEDVMGVIEQEKPDGVIVQFGGQTSINLSVPLANAGVKILGTPYESIDRVEDRELFAELLEKLHIHQAPYGTANSFEEAKEIAEKITFPVLVRPSYVIGGRAMEIVYDNNELEEYMKEAVKVSPEHPILVDKFLEDAIELDVDILCDGEDVFIAGIMEHIEEAGVHSGDSACVIPPQTIPEYILDTIRENSTKLALELNVKGLMNIQYAVKLDEEMVYIIEANPRASRTVPFVSKAIGVPLAKVATWIMQGAKLRDFDLTKEIKLNHVAVKESVFPFLKLPESDTVLGPEMKSTGESIGIDETYGMAFYKSQLSGGMELPKEGKIFISVKEADKKKIRPIAETAANLGFDLIATDGTADATGIDSVEKILKVSQGSPNIRDAILNKEIDLIINTSEGKQSAKDGYIIRRLAIELGIPYVTTLAGARAVLNAIKAIQNNEINVKSLNDYVGGE

SEQ ID NO: 10421 - protein, 360 aa, Methanobrevibacter gottschalkii
MVKIAKLALEDGTILKGEAFGYETTKLGELIFSTGMGGYTESLTDPSFKGEILMSTYPLEGNHGVSEKWYQSDKIQAEGFVCREVCREVSNFGPQKTLDDFLKEFKTPGISGIDTRDLTLKIRERGSLKAAITTENISDDELINLASSQPSIEDMDVVPLVSTKEIKMFNGDADRKVALIDCGVKKNIINSFLERNIGVILFPYDTDYKTVLDYSPNGLMITSGPGNPDRVSETIETMKKLSNRLPIFGICMGQQLIAKSFGARSYKMKFGHRGENQPVKDLNTGKVFITSQNHGFTIDKESLKETDLVLTQINLNDGTPEGISHKELPLHCIQYHPEAGPGPNDTRNIFDKFNQMMDDY

SEQ ID NO: 10422 - protein, 506 aa, Methanobrevibacter gottschalkii
MDAKSEEIFKKHLNNSKEYVKFKKLVNETRVYDIPKELTGELRAYQKIGYSWIVQNIKYNFGCILADDMGLGKTIQVLTAILHFKEQKHYDYEPSLIIVPPTLLSNWENEIKKFTPTLSYYIYHGANRTFPLDEYDIILTSYGVIRLDLDMFLDKKWFICVIDEAQNIKNPNTQQTKAIKSVPAFNKIALTGTPIENKLTDYWSIFDFVNKGYLSTLDNFKRDYVFRIERLEETSTLENFKTITKPFVLRRLKTDDNIKDELPDKIVNDIYCSLTKKQVLLYNAIMEGIFEDLEGKTGIERKGIILNIITGLKQACNHPAQYLRSDNPKINESGKMELLITILENILDVNEKVIIFTQYAKMGEIIKKLVSKKLKTDVLFLHGSLTQEKRSDIISTFQEDEDHKILVATLKTGGVGLNLTAAQNVIHYDLWWNPAIENQATDRVHRIGQEKDVMVYRFITKGTLEEVIDEMSKNKLNLAEKAISNDETFITEMSDEELKEKLSLRL

SEQ ID NO: 10423 - protein, 274 aa, Methanobrevibacter gottschalkii
MDRIIEYMLEEDKGFGDITSEALVEKDLEVNAYIISKDEGILAGMNIVKDLFEEFDVEVVYNLEDGSKITKKDLLMSVKGNARTILLLERTVLNLSMRMSGVASAASYYSSLVKNHDVRIAGTRKTSPALAKFDKYALKVGGVDTHRFSLDDMVLIKDNHIAVFKSPLDALLKAKANVSFSKKIEIEVETLSDAIECVKNKADIVMLDNMSGNEVKEVIDELEKLNIRQNSLIEVSGGITEDNIMDYVESGVDIISIGALTHSSRSLNFSLKIE

SEQ ID NO: 10424 - protein, 297 aa, Methanobrevibacter gottschalkii
MEIIFLGTSSAVHSYTRNHPAIILKAFGEIILFDCGEGTQRQLIFAKISPMKISKIFISHYHGDHILGLPGLLQSMNFRGRETKLTIYGPKGLNALKNAILNLGYCKIDFPIEFIEIGTETIECCEEYIIRSQHVNHQVPCLAYAVEELKKPRFLRQKAIELGVPVGPAFGKLHNGEEIEINGKIIKPEQVLGPARKGIKITYSGDTAPCEEMIDFAKDSTILIHESTYMNEDADKAEENFHSTSSDAARIAKKSNSKQLVLTHFSTRYATLDDLLKEAKKIFKNTKLAKDFMKIEI

SEQ ID NO: 10425 - protein, 251 aa, Methanobrevibacter gottschalkii
MNISVTLNNPAWTLIYILIVIIATSFLTRLIAFLMNKMKRFHNNEAAIYLTRDIINYIIYFIALMIILQFFGINLAGTLLSLGIAGIALSFAAKDLISNLFSGITLIIGKSIQVGDTIEINNKKGIVERITLRSTIISDDSGVKKIIPNSTLTNYPYLHFKTPEKYRVDIQTGLSLNIDVEEFEKYIVKKILEYDGILKNPKPSVYSKGITFEETQLKVSFWVKEFNSKDKYKLTITNEIRKFTKMGEKDE

SEQ ID NO: 10426 - protein, 305 aa, Methanobrevibacter gottschalkii
MSNTLQKEILKLKEEKNAIILAHNYQPKEVQEIADFLGDSLELCIKASEIDDKDLVIFCGVDFMAETAFILNPDKKIVIPTLEAECPMAHMLPEDVLLKAKEENPDAGVILYVNSIAEAKQHADTLCTSANAVKVAQSLPHDKILFGPDKNLGTHVADKIDKVIIPVPKDGHCYVHRLFHVEDVELKREQYPNAEIICHPECDIKVQKACDKVMSTGGMLKYIATSDKEEFVIGTEIDMITRINAEVPGKKLYPLLEGAICETMKLHTLEKIRDSLVNEAPQVTLPKDVADKSKKAVQHMLDVSK

SEQ ID NO: 10427 - protein, 342 aa, Methanobrevibacter gottschalkii
MWGVSIFRELNIEFSNFIMSSFEFESGRILKDVNVEYSTMGFPKYDEDGNITNAIVFCPTLKGERSVLANLHNALTMDNISNDDEFAFIRDKKYFFIRIVSLGSPESCSPSTTDLKHNFPNYTFRDCVNFKKQFLKEKFNLDSVLAIVGEGVGGCEVFTWACEYPDYMEFILSMNNLAKLSGTSYIFFKSMESVLESNDKIYSDVYDPSLSKLVVAVNKMLFLNYLSRNMLSNLSRDELDALLDNFVEDGLFRDVHDLKYLCDCLLEYDVNDKLSNIKAKTILIAIEGQFLVNVEKEVLPLENAIDDVEVMVIQLDEGEFDNGESYSSVFKIFSFLNEYGVE

SEQ ID NO: 10428 - protein, 92 aa, Methanobrevibacter gottschalkii
MIVKILNYGDVGNLKFIEYGIYGLLSTQIDYLMENLEEETSINEDVLIIKMYFESKLYPFQSGAAKFRLDDFVAREEIEMAMFLSSFLEDMV

SEQ ID NO: 10429 - protein, 336 aa, Methanobrevibacter gottschalkii
MWGIIIYDENYFISKNEYFTLNSFEFENGGVLNDVNVEYMSFGTPIYDDNGIIKNAIVYCHGSLGSYSSIKKLAPLLGENDAFDENKYFFICISALGSPGSCSPSSTDLKNKFPKYSIRDVVKFQKKFLAEKFNINHVLGMIGNSMGGFVCLTSAINFPDYADFIICGVSSYKVAGHDFILSQFVNEIIESDPDYNKGDLTYSLIRTLRIACLAEFNFGLSKKALRDMSKIELSSEFENFGNESIETDIYDLKYCNEACMYFDVEEELGNIKSKTLIIACNQDPHFPPELDAIPMSKMINGSKLVIMDSDLGHLCFNELDTISNELKEFMEGLGDC

SEQ ID NO: 10430 - protein, 260 aa, Methanobrevibacter gottschalkii
MKYKILEKPSCEDGYDLVQEALRKKTTILIFACCKVSYEGRALSELNWGERIIMIKPDGTFLIHQEKKVEPVNWQPPKSRTRSYIKNDNLFLESHRRTPKELLTVEIRKIQFINYANIEDFEELEQAGYEKDMGDMIMEKPHMIEEGFTPTAREYSVEHGFIDILGKDSDNNLMVLELKARKAGITAVKQLRRYLQDLENTDNDYLKECESQKKKIRGLLVAPSIMDDALELLENEGIEFVSIEPPRELKRDKKVTLDAF

SEQ ID NO: 10431 - protein, 159 aa, Methanobrevibacter gottschalkii
MLSEEMIDINDINYAIYKIGHWENNYEINQIGLSNEIPVTKNTLKHVKLSMVEIRTSRFELSDKIVNGFVAIAIHLNSNVQNMELDELIELEEKEYQNILKELDNLELLDDNESIPLDSEDYLIYKLEKDCHVTKSVPANLYTINYHNNELKKIEDALD

SEQ ID NO: 10432 - protein, 230 aa, Methanobrevibacter gottschalkii
MKKCPECGNPSYDGAPVCGNCGYKFPKAKNSVPKGEDIFKKEHKKEPSNDESTLTIIKQKKLIIGIILVITLILICGIFLTGSTNKSSPIQNVDTEKYSAGSFSFKYPGDWQELNQTDEEHPGAIFYKAANNTTVEYYNVSSSASSLKEINQNRITHAQSVGASVTLLETITLDGRNASNIILENADGNYTRYVSMFSNGELYVFRLSGDSVNSITSDEINSVINSADIA

SEQ ID NO: 10433 - protein, 275 aa, Methanobrevibacter gottschalkii
MTKIKLALCQMNVVDNKKENIKRAHSMIKESVSKNADFIILPEMFNCPYSNDKFIEYGEKENNSPTLNEISELAKTNKVYILAGSIPEREENKLYNTSYLFDKQGNVIAKHRKMHLFDIDVKGKVTFKESDVLTAGNKVTVAETEFGKIGIGICYDIRFPELARIMVENGALILVYPGAFNMTTGSSHWELLFRSRAIDNQAFCIGVAPALNKNASYHSYGHSIIVNPWGKVIAQASEKESLIISEIDLNEIKKIREELPLIKNKRNDIYKIILR

SEQ ID NO: 10434 - protein, 282 aa, Methanobrevibacter gottschalkii
MSNLSFDEAISNLSAEDVGVRKEAIKSLVGITDEKAIEPLIKATTDDNAQVRFKAAEILGNMGDLAVDKLINEFNNAEGKDKRFLAFALKETEDNRIIPYFVEATEDDDFGVRKVAVRALGELQAINELESISKCLKDEDWGVRLATIQALGDFATDESIKLIKDARKSEDDKDFKKSCNKAIKKAEKRQKAKASGKAIVKVIPMSTIKEMEKSNIQKAIKEYERYVEAKQAKDAPYKRLCVLYRKANDYENEVRVIETAIEVFADNDKKLSYFEKRLAKLK

SEQ ID NO: 10435 - protein, 256 aa, Methanobrevibacter gottschalkii
MKNYFDIKDKVAVITGASSGLGWQIAQAYASQGAKLALFARREERLQENIAEIEKEFGTEAIYAVCDVGNYDSITEAVAKVMDAYGRIDILVNAAGMGNNKMVTDQSNEEWERHIHIDLSGVYYMCKAVGEVMIEQEYGKIINIGSIHSRVIFPGGGISAYSSAKGGVMNLTKNLAVEWAKYNITVNAIGPAVFETELTVDSIEMDGFMDLIKAYCPAGRLGKPGELDGIAIYLASDASSFCTGQLICIDGGWTAI

SEQ ID NO: 10436 - protein, 865 aa, Methanobrevibacter gottschalkii
MIEEQTKIYSKKQIFKTLHPWVQKWFDLQFEDFTPAQKKSIIDIHKRNNILISSPTGSGKTLTAFLSIISELTTLADTDQLEDKVYCIYISPLKALDNDIEKNLEEPLKGIEEIAGKDLGIRKAVRTGDTSQYQRQKMLKKPPHILITTPETLSILLVAPKFREKLSGVKYVIVDEIHSLAENKRGVHLSLSLERLQHLIGQYTRIGLSATVSPLEEVARFLVGYEYGIERDCKLVKINYLKELDMQVMCPVSDIVIADEEDTRLGMYDLLDDLIQENKTTLIFTNTRSGTERFVYNLKKMYPMNYNDSNIMAHHSSLSKEVRLDTENKLKEGKLKVVVSSTSLELGIDIGYIDLVVLINSPKSVARALQRIGRSGHKLHEKSRGRIIVTNRDDLVECSVLLKNAKEGKIDNINIPTNCLDVLAQHIYGMSIENPWDIDYAYDVIKKSYCYKNLPRDDYEDVLSYMAGEYPELEERYVYAKIWIDYKENTFGKRGKLARMIYSTNIGTIPDSSGVLVKCDGETVGKIEENFMERLKKGDTFVLGGRIYRFNYGKGMTINVTPASGPPTIPSWFSQQLPLSFDLAMDIQRFRSHMETKFEYRRSKEEIMDFIFDYLYVDDFAANSIYEYFVEQYKYAKIPSNRLLLVEYYKGFGGRNFVIFHSLFGRKVNDALSRAVGYVVAHQYNTNITISITDNGFYLSSDGKIGGLESFKQLTPENFETILTNSLNKTETLASRFRHCAGRSLMTLRKYKGESKSAGRQQVRGKILLKFVQDMDDNFSILKEARREALEDYMDIKNALKVINMIDNESMEIKTINTVIPSPFAFNLVSQGYLDILNQNDKAEFTKRMHKAILDQIKDKLKDIY

SEQ ID NO: 10437 - protein, 153 aa, Methanobrevibacter gottschalkii
MKTLLVYYSRTDVTKKIAKMIQEKINCDIEEITDDDKYSGKLGFLKGGMNASMGRTSDINIISKNPTDYDLIIIGTPVWASNIATPIYTYLMKYNKDFKNVASFCTCMGNGYEKTLKNISEITGKEQISTMFFTAEDIKNPEEKINIFINEIK

SEQ ID NO: 10438 - protein, 122 aa, Methanobrevibacter gottschalkii
MTKWKAVIIGFILAVIVKSFFAQYEFIGLLFVGFITGYIAHDGALSGLWNAAVAGALGTIVCAILFVLVATLGGSLFGIFGGLTGFTLSGITSITIVLGYLIYYSIVMGITGALGGIIASKK

SEQ ID NO: 10439 - protein, 135 aa, Methanobrevibacter gottschalkii
MNMFSEINIKALVFGAAIAAACILIGYQYWDWLYPFSAIGLIYAGYGQSNIKIGTAMGALASTPVAILTLQGYLGTFKEGFFTTENGILAVTLTVIAVGAFIGFVGAWAKRDRIKALEQYNQKQKIGKNKNKKQK

SEQ ID NO: 10440 - protein, 363 aa, Methanobrevibacter gottschalkii
MGKVKKEDILDILAKYDKSEITIATLGSHTSLHILQGAKEEGFRTAIVCEKGREIPYQRFDVADEYILVDKFKDIVNEDVQQKLRDMNAIVVPHGSFVAYAGLDNVEDKFNVPMFGNRDVLRWEAERDKERQLLVEGGVRIPFKYNGPSEIDRPVMVKFPGARGGRGYFVASSTEEFDAKIEAMKARGWLEDKDVEAAHIEEYVSGCNYCIHYFYSALDDTVELMGMDTRYESSIDGFVRMPAKDQLDIDLSPSYVVTGNHPAVIRESLLPQVFDMADKLTESAKKLVAPGLNGPFCMQTLVNDNLEVICFEISARTDGGTNTFMDGSPYSYLTYGKPMSMGRRIALEIKRAIEREELEKIIT

SEQ ID NO: 10441 - protein, 176 aa, Methanobrevibacter gottschalkii
MLIGLISDTHIPDRAKEIPQKVIDAFKDVDLILHAGDLTSMKVIEELEKIAPTIVIQGNMDRINGIDLPKTKVITAEDLKIGLVHGEVYPRADTQQLLYIAKQLQVDILVSGHSHQPKIEQIEGVLLLNPGSPIVPRLADRTVMLLEINKQEVNVEIKKIGAPVCSALDFDKYKRD

SEQ ID NO: 10442 - protein, 212 aa, Methanobrevibacter gottschalkii
MGSRWQMEKHNDPYYKKAKQEEYRSRASYKLKQLDKKYKLIKEGNTVVDLGAAPGGWSQVALEKVGDEGIVVGVDLNRFKKFHEENYYGLRGDFTTPEIQEKIMTLIGGKAKVVMSDASPSLCGIKNIDQLRSIDLVNVVIEIAENILEEKGNLVMKVFQGPEYKNMLDSLKGKFRHVRTTKPASSRKKSSEMYVIGLEYMPNKRNRKKRKN

SEQ ID NO: 10443 - protein, 139 aa, Methanobrevibacter gottschalkii
MRKSRLSLFKSTSMMISVVGIIMIISTIIVVAYVGYSIVSSSITNDISSGTQYDELAELKAEYSNLSVKFDNIKSTYYAGDADDVKVYNDAKLELSRANSAIENVQSALDADKPSNDVDSRIVFAKEKLESAEKAYNSL

SEQ ID NO: 10444 - protein, 667 aa, Methanobrevibacter gottschalkii
MNSTTKSQTSIAKFEEFFATSYKDDVFKILEQYPDERSLNVDYRALEIFDPDLADLLIDKPEEVIDAAKIAIKNIDPLVKDADINIRFEHLSNIIPLKTLLSKYIGTFVAADGIVRKTDEIRPRIETGVFECRGCMRLHEVEQSSANRIIEPSLCSECGGRSFRLLQEESKYVDTQTARMQEPLENLSGGTEPKQMLMILEDDLVDKLNPGDKVRITGTLKTFREERSGKFKNYIYVNHIEPLEQEFEELQLSEEDEEQIIELSKDPNIYDKIIKSTAPSIRGYRDVKEAIALQLFGGAAKQLEDETKLRGDIHILIVGDPGIGKSQILKYVSRLAPRSIYTSGKGTTGAGLTAAAVRDELGGWSLEAGALVLGDQGNVCVDELDKMRSEDRSALHEALEQQTVSIAKAGIMATLNSRCSVLAAANPKFGRFDRYKVLAEQIDLPAPIISRFDLIFVIEDKPSKERDSKLAEHILKTHQFNTVDYEIEPELLRKYIAYARKNVNPRLTEEANEVLKEFYVSTRNSNPEEQGAVPITARQLEAIIRLSEASAKIKLKETVDKEDAEKAVRLQLACLKEVGVDPETGELDADIVSGGTPKSDRDKIQRVTEEIKQLEEEYAGQAPLNVLISNMSDKYGVSEDKTEQIVKNLVQKGVIYQPVNGYFKRVV

SEQ ID NO: 10445 - protein, 135 aa, Methanobrevibacter gottschalkii
MDKYEDLLERAIDQLPPEVFEHKRFKIPKAYSDIQGNRTFIKNFKDVAEGLNRDPQHLLKFLMRELGTAGNIEGQRAILQGKFTHYLINERIEDYVDKYVICHECNRPDTRIIREGRIFLLKCAACGATAPLKSL

SEQ ID NO: 10446 - protein, 347 aa, Methanobrevibacter gottschalkii
MFCPECGSTDKKMIGNICINCFLKDFQMIELPKRIEVQICSHCNSKLEEGKWSEEFIPEEEIIYRALERNIKIDDKVSNEIINLEIDQMKGTIAKCYVEIVGDVEGTEIEETQETEVKILKTVCPTCSKIQSGYYESVIQFRADKREIKSEEYDKADEIVEKTLIKQLKNDKLAYCPQIAKPKEGHDYYIGSLKSGRKVAEALKEEFGGTIKESPRLISEDKSTGKGLYRIWISVRIPEFEINDFIMFEDKLIQVTSIDKNRIVGNDIKTGKKQNIPLKNMEKIKLIKKSSDIETTTIISMSPSTIQILDPADYSAVDLEMKDEFANYNIGDEIRLIKIDNYTYLLN

SEQ ID NO: 10447 - protein, 320 aa, Methanobrevibacter gottschalkii
MNIEEKIQLIEEGTLEVIDTEELKEVLAKKEPIAYTGYEPSGKIHLGHAVTVQKLKQLQKLGFKIKILLADYHAFLNGKGTIEEIAETAEYNKKCFQALGLDEKTEYIYGSSFQLEPDYTDKVYQLATMTTLKRARRSMDQVSRADDNPKVASVIYPIMQTVDMAALKVDIALGGMEQRKIQMLARENLEKIGENVPICIHTPLLHGLDGDAKMSSSKGNYIAVDDSIKDITKKINKSYCPQGEIKGNPMIEIAETFVYPNEEKLLIKRPEKFGGDIELTHDELIKEFSEGNLHPMDLKNGIKDFLIEFFAPVREYMEEN

SEQ ID NO: 10448 - protein, 69 aa, Methanobrevibacter gottschalkii
MVEEKEEFEMGLPNGVGEQMLAHAFEKFDIKLEQTEFGPKLIGEYDELIKVKEFLETGIRDRLKELEGE

SEQ ID NO: 10449 - protein, 192 aa, Methanobrevibacter gottschalkii
MYIVFEGIDGAGKSTQIQLLKQWLEDNGFRVETLVEPTDSEVGKLIRKILQRPDATTDNVQKTLGLLFAADRMLIMDKLEDKSKIIISDRSFISSLAYQEPVDWIEVLNKYAKKPDLLVLLDLDVKKSVARTSGEDTFENEEFLIGVKDNYLKLAKNYTSEIIDANNGVNKVSSDIKKVIAPYLGICPDCIQ

SEQ ID NO: 10450 - protein, 844 aa, Methanobrevibacter gottschalkii
MNNQSRCKNKMVLKELLAPAGSYDVLVTAVNAGADAVYIAGPNYGARAYAKNFTIEELEKAVNYAHLNGVKIHVTVNTLVNNFEIADVLNYLFKLYQIGVDAVIVQDFGLIWLLKTFIPDLEVHASTQMGLNNYSSIKWASDNNIKRVVLPREVNINQIKKTYNQLKKDNISMDLEVFGHGALCYCVSGKCYMSSYNSGRSGNRGACAQPCRRQYRLKYRGYNIGNGFLLSTHDLATYKNIKEISNAGVKSLKLEGRMKSKDYIGTIVNSYRNIIDGNPGNYEKDLHLVFNRNFTSGYIMGDKPGEVMGRESSGHEGLYIGDITNIEGTKVTIEIKNKEIPVILEPGDGIAFKYNGKIKGIYLENIIKQDENEIIIDTTRLVKEGTEVFISYSSSTHEYLKQFEKETIKNHIGLNLSLTWDKELNLYTKVEYYVDGELINFRHKSLDMFEKAKNKPVDEKTIENQLNKTGETPFFIEKIQFNNMPNDMFIQIRKINQIRREILDNATELLMKHYTPTKKAVKEVRKNLTKFFEDYENNKGKIKQKTPKLSLFIDDLSQIRAASGFGLKRIYFDGTCHYNNPDDYFKNIKDTLMKGSLMASPTEFVWVLSSFMTQKDAIKCNEIVKELENEGIIISVMGDFPGMNDIFECPVYGNHNLNVWNSFCVRDLNEAGFKSLILSSELSGHEIKELIRRNHDRNIDLEMIVNGNLEVIVSKDDFTNLNDGKDFIISNDADYAILEDKKRKKFKYKVFFDYNRQSHIINKDCLCLIEEINEIKEFGLDSLILDCRYSNEKYTTQILSIYNESLHNKDQDELSKYKYQIMDFSQSYINKGNYIEGRLHEDKK

SEQ ID NO: 10451 - protein, 805 aa, Methanobrevibacter gottschalkii
MRIPELLAPVGSMDHLKVAINAGASSVYLSGKEYGARKYATNFTLDEINEAVDTAHIHNVKVYVTVNTLIKEDELEDVINYVSNLYAIGVDAVLVQDLGLVELINKHIPKLKIHASTQMTCENQLKLNYLEQKGIKRVVLPREMRKEEIKSLNTNMELEIFVHGALCYSYSGQCLMSSFKGGRSGNRGTCAQPCRQKYKIEGIGKENYYLSPCDLSLFNKLKEILELNIDCIKIEGRMRNKEYLAIVINAYRKALNKLKSKKEIENENINLVFNRGLCEGLFNDSPKRSLKAGHIGLKIGHVIKSEKNQIAIKLDDSIKTIPEKGDGLLIIKNNDDYGFEISQNPIITSLNHFKTGKNKPMKNLTRRDKILIVKKVWQNKKSTFNLNESDVYLTKKNKLTKKVKEIESKGSSFIKSKLVLTFSIKNKYPTLKGKLTLQNKKEVESEVIGNTPFEKPIKKSINREVIKKQLQKIDNYPYNIIQININYDGTLFIPIRKINELRRNLFERLEKEAINSFKHENKKIKLKQYNNETNESKYNISFYTNNLKHLEHIENVERVYLEIPNNDDSLILSEEKPNISYMINFIKQAYEISYDKDYKLIWKWPDITHDNLIKSLNKVRGILNKMHYTLPIMSNSFNGEYGFYSMNITNNETINSLKDYKILTLSPELTKKDYENIIKHCRYPKKVEILVQGSVELMKTRYPLLYGAEVKKNYKNYLIDKKNNKYPIHKSISSQELSIFNDSELSLINEIKHLKNINYSNFAIDGRYKDDEYYKMIDIYNCAINGYINEKELKKYSSKNTIANY

SEQ ID NO: 10452 - protein, 641 aa, Methanobrevibacter gottschalkii
MQREIITLQNIKGIGDKISEKIIKSVGGEKELQKIVDNADVEKITNIDGISQRKAIDIMNQLLNNPKSEFIKSDRAMEIYEDIINKILAYSNTSYSKNRILLLSPSKDIKKINSQLDFVMDAKEHVSKLPIIKLKGLMKNLKEVEEVKTEYDPSKVILVESEEDNSYLTDLGLNQYYPIITASDSPLLQEEMMNYDLVFYVYSQGILDFEGMPNLIMINIEDNDYEIVPEKIINFFIQNKDLFTRVHEIQKIRNKDSVLGEIVPIIDELNIIDKREVNIEKLVYSLKEDMDNELEKSIKQIDLEGNEILNLLNNNFPPKISKIFDDIINKRKDIIREKTGLSFDPFLRTYPIEIDDAEIQRITLEQSSKKENDIFDIKRSAAIELNSIKKKAIEEVEDAIKFDYEFSLGSFAYEYDLCRPKFSEEIQLTGALHLELALKKDKEFIQKINYQLTQKENISLLTGANSGGKTTLLETLTQISIMAQMGLPVCADNVQIKLFDEIYHFSKKRSLDAGAFESFLNVFIPIVTTNSEKLVLLDELEGITELDAAVKIISTFIDMIKESNSYGVIVTHMARELMNYTDIRVDGIEAKGLDEKYNLIVDRTPRMNFLAKSTPELILKRIYEKSDDNLKAVYSRILEKF

SEQ ID NO: 10453 - protein, 493 aa, Methanobrevibacter gottschalkii
MIFLNIKVFDTTLRDGEQTPGVSLTQQEKLRIATKLDEIGIDYIEAGSAITSKGERKSIKGIAQQGFNAEILSFSRPLSVDIDYCLECDVDGVNLVVPTSDLHISDKLKITRDELIQLSNNAVDYCKDHGLIVELSAEDASRSDTDFLKSVYLSAINHGADRICVCDTVGILTPDSSFELFDKLNEDINVPIAAHCHNDFGLAVANTLSALKGGATEFHSTINGIGERAGNTSFEECVVSIDRLLTNFSTNVNIHEIYDISKLVARSTGVYIQPNKAIVGENAFAHESGIHSDGIIKNSATYEPMTPELVGRKRKFVIGKHMGTHGLENRLKEIGLSVNKTQLQQICNDIKELADKGKTVTDVDLHVIADNVLEINHEDRIKLDELTIVSGNKIMPTASVKITFDDEEILNAGVGLGPVDAAINAVKTVDAFSDVELIEYHVDAITGGTDAFIDVIIKLQKGDKVVSARGTEPDIINASVKAYISGVNRLLRD

SEQ ID NO: 10454 - protein, 163 aa, Methanobrevibacter gottschalkii
MYMENIQILGLKGTIDSVSETLNLIDGIKEDSEIIQLLNADSIASRNHIIHGVNQAILAFDRCENLAKDLSVEIVLRCSAQRQISKAFEILGLKEGYMNLCAILVNSKNHTSELSEIFSLDDNVFIPDDEILMKIYKISDIEIKNMSLEDIIIDRITKLTVNY

SEQ ID NO: 10455 - protein, 317 aa, Methanobrevibacter gottschalkii
MFKFKTPSEKTRQTMSKVALGKTNINFEERCTEKIKRLTEKEEVKITSSGNNSIFIALSAIKGDIIIPDQGGWHGFKQIAKFLNKNIITLKTDLGLINPKYIDELDLREGSALIYTSFAGYCAEQDTKSIAKYCKNNNILTIEDASAGIGDSEKKLGKYSDIILASTGSPKIINVGQGGFIASNESEIFKEDLMPQKLSKTSEIVCSGIDSELDNIAEKLNLTVNATNYLKKYINNALHPNKRGVNVIILHDDAKAIGWNLKKKLTTDKSGFITTCPNYNRVKQKAISIEIKNLDYNCLKKEHLDKIIEEMEINNLQ

SEQ ID NO: 10456 - protein, 390 aa, Methanobrevibacter gottschalkii
MKTTKNAYLAKLTEQIQMKSVKVGKNLEGTTPPSVFIGRWSYPKVYAGPMMSSQMGDTSIMDTPEDWIGQNKTQDEIINYRMNLVRGKQLIKIDDLENPFIEKLQDISLASKSIDSEATFGRRPTGSVLTEDSMPHGPSAVIEKFDIDAVKWDRQLEKTFYDTDLKSTDAIVNLHNKDVPFTAMQKAFSVGAIGTKNKRKLVPTRWSITACDSTLADEFLKKVRKFEKLDTYRVFEFGALNNYYVIILTPTEWQYEWYEAFIRLMKNEELIFSDYETNGGKKEYSIVGGCYYTAKMVVLDYLMQIKKQSGLLILREAYDGYVPLGVFNVRENIKEAMQRPYIEFETLESCLEYAGTKLRIPINRYVKQGTLMNEMLHTKQTTLDMYFKSG

SEQ ID NO: 10457 - protein, 311 aa, Methanobrevibacter gottschalkii
MNKMLSPKEFIEDSIQKIKDQIGDEKAIIALSGGVDSSVCSVLVQEAIGDNLTAVFVDHGLLREGEVEQVTNTFKDRLNLKFVDASDEFMDALDGIEDPELKRKIIGKIFVDVFEREAIKSGAKFLVQGTIAPDWIETKGEIKSHHNLALPSGMKLKVCEPIRDLYKDEVREIGDELNIPASTVYRQPFPGPGLGVRVVGALTKENVEVCRKANKIVCDEIEAAGIDKDVWQYFAVLTNTKVTGVKGDQRDFGYLVVVRVVNSIDAMTASVAELPWEVIQTISKRITSEISEVTHVALSVSDKPPATIEFC

SEQ ID NO: 10458 - protein, 85 aa, Methanobrevibacter gottschalkii
MIDNADDLRDKANEFKIGLKKQSINVQIGDEEYSFRISGIGQKSVKLEKYVKFDEIFEAIESGNDNGLETIIKQFIEDYEEEDDE

SEQ ID NO: 10459 - protein, 185 aa, Methanobrevibacter gottschalkii
MTILVINNKGQYNHRIARSLQYLKIPSKLVSNNLSIEEIEAENPIGLILGGGPSIEDAGLSEEYIKYFDIPILGICLGHQLIAKVYGGEVTTSDTESYAQVKIDIKNDENLFEGLAPEIDVWSSHKDEVKTIPDEFEILASSNLCNVESFKHKDKDVYGIQFHPEVHHTPKGEAIFNNFYKICKK

SEQ ID NO: 10460 - protein, 48 aa, Methanobrevibacter gottschalkii
MELKDLIFVIAAILIAVVLLKIFFWLLPVIVVLIIAFFIYVYLQDRYN

SEQ ID NO: 10461 - protein, 304 aa, Methanobrevibacter gottschalkii
MNQYDIIIIGAGPGGLTAGIYAGRQGTKNLIIDKDLAGGLGREVPEMENYPGFDKISGLELVEKMKEQAIKNCDLHEMENVEEIIRTDDEYRFTVKTDKDAYQSKIIILATGSSHRQLNVKGEEEFRGKGVSYCATCDGFFFAGRDIVMVGGGNSALQEALYLNNLGANVTLIHRRGEFRAQKHLQDMIKKEGIKTILNATVEEIKGDMLVESVLLKDNETNEMKEVPTNGVFISVGYMPHTKLAYQLGVTLDESGHVIIDKSQKTNIDYVYAIGDVCIGLKQWVVACGEGAVAATSAFEDIQN

SEQ ID NO: 10462 - protein, 143 aa, Methanobrevibacter gottschalkii
MFCEKCGKEIPDNTRFCSNCGNQIKKPNNKITEEKNMYLALFLSIFLMGLGIYYAGNKKKGIILFIFILISNRMRKFQIFIIIAIILWIYAIYETYIDVKRANGEENPNLLEDINNFTTSKHFVHIIAIALLFAVSYFLISKL

SEQ ID NO: 10463 - protein, 249 aa, Methanobrevibacter gottschalkii
MKMCNRCGAENKDKSNFCSNCGAILNNPKPTHSYDKKLIERFMDANIILKLIIIIVAVFVFFVASAWIGHIFFGMPLEFYTEGDATYHLSQFNKLDLDGDGNLTFYEVKGLASDISQDNLSGIFDAADKNNNGVLKGSEFDGYLQFIDKYYKELGKQQKAERKNSAQQKSSSSSSSSNPSFQDEGHEICPVCGGNQFTEFYNSQYGEMNWQCDYCGEIFRSDDEFYIDYWESNGIKCILPALENNLDII

SEQ ID NO: 10464 - protein, 346 aa, Methanobrevibacter gottschalkii
MEDEIVCPKCHKRNDLHKFCIYCGHKLLDDDQIGLILDNPEQYCLNCGRLVKKGQKKCECGYEFSDINCPECNSKNSYTNRFCTTCGKKLWTSNVYNYKYSKHLFEKHILKEVLPYSLRNTSLYQRPKMDFTLNHLLYCNEYLNGLKSAKSKIDEYLCEIGSRWKVVSPNYCINCINIIKPDECSCTKCGSILFADKKRVDCLQTKNKYVKPKFDNVELKWTSKFSNDYLDSLAPAIGESQFEYRERLKWEFAENNYHKISIIGAIDRKRKDEGRKRQIEERKRLEEEYIRQFGGGYCSSSCRYHYEEIITPRGISADYTDDMYGVDYCCRLGHFVSHGSFCKDYE

SEQ ID NO: 10465 - protein, 250 aa, Methanobrevibacter gottschalkii
MTNKICFECGIEQDDAFNYCINCGALLSNENDDSLSNSNEYRLPEDIENQNDEYDNLNDVKTCPKCGIEQEIFAKFCRNCGASFSSENKDEITIRCEYCGAELNDEAFCPDCGKATGITICTNCRQKIVNEDFCSICGYQINHKIKICANCGSKIDAMAKVCAHCGAKIIKKNPLIALGFSFVFPGLGQLYNNQNHKGFILIIANIISFILCFIFIGIILVILIWIYAMYDAATSAIAINKGEILEDKLF

SEQ ID NO: 10466 - protein, 621 aa, Methanobrevibacter gottschalkii
MDYEKLGLKMGLEIHQQLNSEHKLFCPCKTELVDDDFDGIVQRKLRPTQSELGEIDRAALQESLRGLNFKYENFAKHTCLVENDDEPPHSLNEEALDICITIACLMNMHIVDEFHTMRKQVIDGSNTGGFQRTGMVATDGYLETPYGKVVIESLGLEEDAARRIETKDGFTEFRLDRLGIPLAEVTTDPSMHHPDQVREVAYMLGQILRSTNVKRGLGTIRQDLNISIAEGARVEIKGVQDLDLMAEIVNREIQRQLVLIDIKKELVARNAEVLDEIHDLDELFKDTESKILKSAETIKAVVLKGYDGLIGREVQPGRRFGSEIASYAKKRGVSGIFHSDELPAYGITQEEVDNVTDYLNIGEDDAFIIVAHDEDIAISALEEVKRRASLGLDGVVEETRKALEDGNTEYMRPLPTANRMYLETDIPLFKITADRIEPISNNLPELPDVKQARIIKEYNLSEDLATQLVKRQEADMFEAIIADVSIDATPVASLLAYDLREIKREGHDITALGLDHFKEIFTLLAEGKIAKDSVRKLAIETIKAPESDVAEIAEINNLTMLSEDDVVKIISEIVAKNEGMVKERQMGAMGPLMGMCMKQLKGKADGGMVNKTVRSEIQKLI

SEQ ID NO: 10467 - protein, 436 aa, Methanobrevibacter gottschalkii
MTYKENAEKFIETYGLSIGDKIQVNKEDITYTGILLDRPEDADDGYLVLKLSSGYNIGVAIENTAAELIEKGEKPKIGFGKSEIPADPKKQNISIVSTGGTVSSVIDYRTGAVHPAFTASDLVKANPELLDYANYNVKALYNILSEDMKPEYWVKAAREIANDISNGSDGVVIAHGTDTMHYTAAALSFMLKTPVPIILTGAQRSSDRPSSDANINLIDSVVAAKSDIAEVCVCMHGSLNDKYTYLHKGTKVRKMHTSRRDTFRSINAQPIAKIENKKININPDYAYTKRGVNGLELNANIEEKVGFIKSFPGISSDYIEYHIDNGYKGLVVEGTGLGHVPNDLIDSFKRARDENIPVIMTSQCLYGRVNMNVYSTGRNIIDSGVISGVDMTPETTYVKLCWALGQSDSYNEVKEIMHEDIAGEFSEKSSIKDFLN

SEQ ID NO: 10468 - protein, 481 aa, Methanobrevibacter gottschalkii
MSDKEIGKDYELKVRRNPQSLLEEYPRKGNNIQSTHYCAGCGHGIIHKLIAECMDELGIQDRCVMISPVGCSVYAYFYFNCGNFQTAHGRAPAVATGISRAEDNSIVMSYQGDGDLASIGLNETLQAANRGEKIAVFFVNNTVYGMTGGQMAPTTLVGEKTVTCQTGRDPNYTGHPTHMCELINTLKAPVYIERVSLANPLKIRLAKYAIKQALTVQKEGKGYSFVEILSPCPTNLKQDVKSAQKFIEEQMEKEFPVKNFRNDLYKRESIQRPVSDFSTETLDKVFNVNRDGNSGYVDDASISSTSIKVSGFGGQGVLSAGLTIAHAACDEGKHVSWYPSYGPEQRGGKSNCSVVISNETIGTPVVDEMDILIALNKPSLEQFSQDVKTGGTILYDSKIGEFETDRDVNVIAMPCVDIAEEHGNARTANTALLGGLTELTDALKRESYENAIRDMFASKPKVIDVNIDVLKAGAEWLKNNS

SEQ ID NO: 10469 - protein, 371 aa, Methanobrevibacter gottschalkii
MSNQMVKGNTAVIIGAMYAGCDCFFGYPITPASEILHEASKYFPMVGRNFVQAESEEASINMVYGASGTGHRVMTASSGPGISLMQEGFTYLAGAELPAVIVDIMRAGPGLGNIGPEQGDYNQIVKGGGHGNYRNIVLAPNSVQEMCDLTMKAFELADKWRNPVVVLADGTLGQMAEPLEFPAEAVKPEIDESWAVRGTENTMGNLITSIFNDFDELEDFNYKLQEKYAKIDAEEVIVDEYQVEDADIVLVSYGISSRIARSAVDKSRESGIKVGLLRPITLSPFPTERIKELADKGVEFISVEMSNGQLLADVQFAALRREKTHLVNRMGGNLIELKQILAKIYEIAGFEDHDLDLSKRSAEKASPNIID

SEQ ID NO: 10470 - protein, 96 aa, Methanobrevibacter gottschalkii
MIEEEISYPVINKEICKGCMRCIVGCPQNAILLSEDMNNAGYQFAYYSGNGCTGCKDCYFTCPEPLGLEVHQIKNITNNSIAKMIKAKVASKGGIK

SEQ ID NO: 10471 - protein, 557 aa, Methanobrevibacter gottschalkii
MTSLIGNFVERVDFNSYEDFMKNFKLKYEPDYNFGFDVVDKYAEIDPDKVALIWTNDNDENHTFTFKDMKEYSNKTVNLLRKLGIKKGDKVMLTLKNRYEWWFCMVALHKIGAIVIPATHMLKLHDIDFRLKQAEVKAVISVEEDSLLPDFEEAEKGLDWDLIKLVIETDRDGWINFNEAIEKESSVYERPTGDENPMADEVFLIYFTSGTSGNPKMVSHAHTYGLGHIPTAKYWHNVIEDGVHHSAADTGWGKAVWGNLYGQWIAGTSVFIYDYERFNGIKLLEKIIEHKVNTFCAPPTVYRFLIKENIEGYDFSNLTYVTTAGEPLPPEVSEKFYEISGLRIKEGFGQTETTLSIATFIWLDAKVGCLGKPSPLYNLKLLDESNNEVDIGEKGELCFDISNGPTPGLFKEYYKDPVKQAEQCHDGFYYCGDTAWVDEDGYVHFVGRNDDIIKSSGYRIGPFEVESAVLSHEAVLHCAITAYPDEVRGQIVKASIVLQPGYEPSNKLTKDIQNHVKNVTAPYKYPRMVEYVDDIPETISGKTRRVEIRENDQKKFN

SEQ ID NO: 10472 - protein, 220 aa, Methanobrevibacter gottschalkii
MNYHDFEKPLYNDKFKLSICYTINIIIKINYKKQVFILNEYNKDIGNRIRELRELSDITISEIASDLNIKEETYIQYENGEVDIPASFLYELAHIFKVDLGLLLTGEESRMSIFDVTRANKGVAVDRRKEYLHENLCSKFIHKKAETFLVVVDPEKNPVPSLNSHPGQEFNYVLEGSLKIYIHNNEIILNEGDSIFFDSAHRHAMVALNDKPAKFLAVII

SEQ ID NO: 10473 - protein, 123 aa, Methanobrevibacter gottschalkii
MSTNEIGTKVLFKKQLGLNYEIDQKYVGLKMKENNILSFNFRVPGDLKDEVEAYFKRFKLGEPILVDIGGTGDIKCDFKGISPVLKNKDEFDQYFISATLQEDKTYDPMEEEKCETCSGCGFH

SEQ ID NO: 10474 - protein, 129 aa, Methanobrevibacter gottschalkii
MFNLIDSTLFFASYGNIFGLANIAVSPIDIILAYVVAIVISIIMAFVLKVPLLPSKPYRYSFDVCAVYPTPIIAIGIFSIFLVLNYTFIYNGLVLAIIIGILSALFVKYLFNFVFPKPLNEDEGDEINE

SEQ ID NO: 10475 - protein, 165 aa, Methanobrevibacter gottschalkii
MNEVIGIIIAAVLCWLNFVIVDTYFGLPEQPGVRGAGIIGQDVEKRGGDIAGGFFQGNITCSPDASAGTLLASIGYLVLGIPGGIIAAFFVFIGNRLCADPGYAGTCGSLTATCIIFICSFLGMTPEMFIVGMVIAILTVMGISQTKASVILGKVAKKFNRHARE

SEQ ID NO: 10476 - protein, 82 aa, Methanobrevibacter gottschalkii
MYGEIIGVIVIFVALRALVTRNRAERLLYLNVIGFGVSAIVAFVINTPFALIVAAAFFICSTISANAIAYTLKRLDDEILLE

SEQ ID NO: 10477 - protein, 89 aa, Methanobrevibacter gottschalkii
MEFFVSIIAIALMIIGAFGIIFMKKPLDKVIMFSVLDAGFVLVIVLFKYLDVAMFAALADPLSTLVFILAIVKINEVRKKKIISGGTDD

SEQ ID NO: 10478 - protein, 86 aa, Methanobrevibacter gottschalkii
MISVPLFFYFGIFLAIVGSIATAWGPGVKDPIIRTFNTEVASIGVCLVLLCYNHVLALLTLLATTVIISLILFRAIIRLEEMGANI

SEQ ID NO: 10479 - protein, 197 aa, Methanobrevibacter gottschalkii
MRIGVLWNKLAEPKNIPRLFAFSLGIILILGLIVPMALNPDQLYVRPAPQEQIGDGLSIAPYDRGGEVLTQPGQINPQYPDNSRELGMITAYMSPISQWVSSISPYFGTSIYSSPGGLIDEILYYTRGFDTILESSILMMSFIIASWLSINYTMNRKNDESEIKKDVKKAIKDSTKVANEISVSDAKARAKQLRRDN

SEQ ID NO: 10480 - protein, 231 aa, Methanobrevibacter gottschalkii
MVFIPQFVPAAFLNMYLPAIYAGLIVGFIGSMAIALKREEIHILILTDIVGLAMIFIVSAVGTDLAEALILPGLVVELAETLAISEILITREMRIIENNPRKNLSNSSSLFPQLFALNMEILNTAPNFIALVLIAYGIFLTGFTGGAVAGGGIVLYALSKKARGLPVLVLDGIAGVSGIAWCLWIIGFLFFFVTPQYWLLSLFLAACGLLLKVASKVGLIGLLMREDIDKE

SEQ ID NO: 10481 - protein, 223 aa, Methanobrevibacter gottschalkii
MDFVTLGGNLLGTIPLGDIVLYLTPFNLFLFAVLLGFTVMIGLSKPETQIEATMHYLSNTEVKVGEKEFKQRRFLSVLCGIASAGAMITGDLFNFTLFMALVGMLNIGIVSAVRQTSVLNSAFNYGLIAMMCSLPLFGGASIILASTGTLSLAVLSQMPVSPMVVFGATLMLLGILGESGVAPFFASKAEMFRTAGSPFIVIIHLSSLFIIVRAVEILLLVLW

SEQ ID NO: 10482 - protein, 76 aa, Methanobrevibacter gottschalkii
MVSDSMDSQKSLCIILLVLSTIAIIACLVVNFEAWIVYTIAIFGIPVWVLSLGLLTMAKPRPEDAEERVKEPFTGY

SEQ ID NO: 10483 - protein, 290 aa, Methanobrevibacter gottschalkii
MNLMADILIQVIIAFIAGSLLLGLHRKIMARVQKRPGPPIVQHLLHSLKFFFKETAFPKTVSKLFYIGIVFILALIWIVGVIAGPVAHDSLLILFGVYAVYKIVEHNSGSSSGSPYGKLSCVRAVLSAATELPLFAAIIFVYLVTGSMNIGEIITYQSVNGPLVFTIPLAALMFFMLIITKSPYSPFAITKDKALISGFETEHFGFLRGFMLFSESIAWYVMLWVFLTIFFGPLNAVGYVIGMIVITFITGFINATTPILSPNHSVMTQITIGAICFFGTIIMLFGGVVL

SEQ ID NO: 10484 - protein, 84 aa, Methanobrevibacter gottschalkii
MNSEDVIVYFTALVAIGIVVVGLLTTVFHSSVIAPIVIIGIILSIFVLCTRSNFSHKIESIEKICFVITLIAIICSFILLYRPM

SEQ ID NO: 10485 - protein, 101 aa, Methanobrevibacter gottschalkii
MLDYMIYILVFAVGSILGLLYSYKLHGEPYVVDTEFNVLLAVVSVAGWCLGFLSGNIILSAIGFLLAGFVMGGRPGYGRRETAVGLIVAIVAYLLLKCGML

SEQ ID NO: 10486 - protein, 130 aa, Methanobrevibacter gottschalkii
MDENAKLKVMQERIIKSYAWQRDIIIPLSNEFNCTNEELEELFFDLLDMNSLESLHGTFDSARDICLYQKFNADLRLCWFIDSLEVISQEEGKKLKMRLVEEVKKGRSYDDVLKEGRLELFELLKKETNY

SEQ ID NO: 10487 - protein, 149 aa, Methanobrevibacter gottschalkii
MLDAVKDAVRKSSIHVCIVNCGGCNGCDVEVVALLSPRYDLEQYGIYVQNNPREADVLLLTGAVTEQWIHNLKRVYDKAPEPKIVVAVGNCPQSGDVFAQEGGHVHAPASNFIPVDAAIPGCPPRPSEILEAILSVGPQAIADRGREEK

SEQ ID NO: 10488 - protein, 374 aa, Methanobrevibacter gottschalkii
MIVPIGPIHPALKEPIRLKLQTEGERVVKAEIEYGYVHRGIEKIIEGQTWQKGIYLSERVCGICSYEHTQTFAETIEKISNVDVPLRAQFLRVITNELDRIQSHLLANSTFFKSMDHETLFMHVLELREYAMDSIELLTGNRVNMGWNVVGGVRMDADERHFKPILENLKKIEEGFDTTRALFAEGPALALRCKGIGHMSKKEAIKGRAVGPIGRASDIKEDYRIGHYTYDDYFDFKVIRRKEGDNYARTLTRFDEIPESISLIRQAIENMPKGEIRTPADLKSGYAMNKNEAPRGEVTYMIETNGNLIKHISIRTPSIANMDSCAKYMIRDVPTVADAVSTYASCDPCVACAERVAITNEHGKTELKNIYEVI

SEQ ID NO: 10489 - protein, 341 aa, Methanobrevibacter gottschalkii
MSSLMWYIFDFARKAWADAFTNAKTNPEIAEKPERFRDFPKVNKEYCIGCGACTVSCPSPNAIKIVREKDDETGEGSTYPVITPGACIRCGFCAEVCPTEPKTLECGLNHLILPEFNLIPSKRQFIVDDYLCIKCKKCIKKCPVEAISLIDGNVVVDQLKCISCGECLEVCPVNGAMKGVFVDNLQDQKELILLTVNYLEEFINSKEEDLRSLDHNGLLQYDVPLSNIWDEALKIIPDEEISLEIITNAVNRLKVRIIDWDKSKCKKCQLCIPDCPTGCISFDEINDTIVRDKDRCLRCSICYQTCPFSVIKYFIAKFAFDDGENIHVTVKASNLNEDIVE

SEQ ID NO: 10490 - protein, 452 aa, Methanobrevibacter gottschalkii
MIDSYTKTPRPLRHVDVEYLIDQTKCANCKDKPCLESCPIDAIYLDNEEGLIKIKSTCFGCVLCRNACPYDAISLEVHMDSPIKENVPNINVKLCKACGACVQACKKGSIHIVSDGKQPPHSEIDKDTCVRCGYCFRVCPTDAIKYGQLLPKTVKGGKAVVVNQDNCIGCMTCIRVCPSMGALNVARTNKLPYINPGYCARCEECMHSCPSGAIKYSSRKKAYKMYSEIKSFDIVSEIVDHDIKILSLDLISLNKVLQKVGKSIALEFNDQNFENFIEYKVNDLMERELSISLNSNIEVGEFTKLVGSYLMDRNIEIYNNKCIACGDCYNVCPVGAIELNGPNPISISDNCIYCGKCVEQCKFDAIGAYDDYFYSKDTDLYYARSYLRGQRLGDFTLSNSKCQACAICVNNCPTGALTLGDDIIEFDDEKCIYCRNCEAICPLDAIRIVNFR

SEQ ID NO: 10491 - protein, 348 aa, Methanobrevibacter gottschalkii
MFEKSFITDCEGPLTLNDNAFELAANFIENGGKLFKILSLYDDYLVDIVKKENYKAGNTLKLILPFFIAENLKNDDLIDFSQKHIYSVEDSKFLLTYLQKVMNTYIVSTSYGQYIEAISNYMNLPFKNTFYTKVNLDNITPTVQEINKINEFKQLILENPKDYDLFDDIFFSRITKMDIYEKIKNVEVVGGQGKKLAIDQIIERDNIDKDEIFYIGDSITDVEPLDFACINNGISVSFNGNEYPLKVAEIAIVSPSAVATAVIANIYVNYDKNKVMEFIKGYNNLNDYEKLFDDYNVDGEIKNRFFSFFNSGKYPLIEIINESNFDEILKASKEMRNNIRGKDIGGLG

SEQ ID NO: 10492 - protein, 296 aa, Methanobrevibacter gottschalkii
MSYEKVKDTFFEAFEGKYVRALITGPSEKIVKWAAYDSTSTPSAVIGRVEGGVEGFLDESQTPDGRFGAVVQYWLGGDDVGKFAFELSYRLRQDVLVKPFTRIFDYSASNSDECIEMMDIVGHCGDGYEWIVEEYGRKMINVPIAVPDFQIEEKFKINNGIMGGNFWYLCTTAQAVIEAGEAVIDAIMNVEGATTPFDICSAASKPETNYPEIGPTTNHVYCPSLKESLGDISKVPEGINYIPEIVINAVDEKSMNKAVKAGIDAALEFEGVVGISAGNFDGKLGDKNINLLDILK

SEQ ID NO: 10493 - protein, 315 aa, Methanobrevibacter gottschalkii
MEILDDDINAEVVGFGALNVDKLYSVANIAGKDEESFIKSETDTPGGSAANTIVGLSRLGCSTSIIGKIAEDNDGDLIEYNLAINGVYSNNLIYSETGSTGKCLGFVDDEGERCLYINPGVNDEIQLGEINPLNIMRCKIMHYTSFVGDSFKTQIELLDLLNENTVLSFDPGMLYVQKGFDELKPILDRTGILLINESELRLLCNNYKSSLKELAIGFLDLGIETVVVKQGAKGVFAINNSTDCFVESYECDVVDTTGAGDSFNSGFLYSFLKGYDLEKSCRIGNWVASKSIEGFGMDKFPSAKDLEDFLSEFNY

SEQ ID NO: 10494 - protein, 275 aa, Methanobrevibacter gottschalkii
MNVSFIKQMKDLEREVLLKSVELDDDSDDFQFELDDFSANDEIIAVAPKCVRCNTCVGECPVNAIEPANIFRIAKITDKCVKCEICVQSCPVSAIKLIDNSIVYDGENEENIIEYKLSNISSRHRVVRMNNISIDYSCDNNWDDCSKLCPTNAFTLEFKEFFDDLDMDLGIELIDDELYPYVNEKMCIGCGACAEISLNDNAIELDRYIGPIIHSRFIDVNHDLCVNCYLCEENCPTGAIELVDGKVVLDDDKCIRCIECTRHCPVVALKRVEIE

SEQ ID NO: 10495 - protein, 211 aa, Methanobrevibacter gottschalkii
MRAKELMDKNFVYLNANDSVIEVSKVMEEIRRFTCPVVNDNKQLIGWVTSFDITKGLREGNEKISDIMSGYEEIGTVHADDPARKAVILTANNKFVTVPVVNDDKQIIGMVRACDIVELLSELYDIKVSKLYEAMQNQLKGVTWEELMAASALVSQKTTGVKISPEAYEENIMNSTFGEAIWSTGGLEKFFAGLISVGELVIARRVGKARR

SEQ ID NO: 10496 - protein, 213 aa, Methanobrevibacter gottschalkii
MNLNFDFTEKRVIITAFFCMAFTIANLITVKVINIGFLGMETPAGVLIYPLVYILTNVIADVYGEKIAQRTIILGLCVDILFVFMTTLILFLPSPAYYTGDSSLAFVFTQTPRILVASYISYLIGNFVNARITAKVNEGKEYSSTKNLGILAFSELIDNFVFIGLAFVGVFAVTDILIMIVSHWILSLIWSAIAQPFTKMTVKWAEKGKPAEA

SEQ ID NO: 10497 - protein, 121 aa, Methanobrevibacter gottschalkii
MELKYIIVLFDGEFMKFKSKFFISLLIIFVLSIVAVPASDVNSTDFSQLNDTVLDSSFNDNLSTVETSNNSKTVNNTNNGDMVQIIKTNPKITVKSTYLKSKDKLEFNFKNASGNPLKSKS

SEQ ID NO: 10498 - protein, 523 aa, Methanobrevibacter gottschalkii
MVFIGNKKYSVYTNSKGVANLNINLVAKTYKLTISFEGDDNYNAVNKIMYLRISKLSTRITCYKNFVVKGNNLYFYLFDSYYNPVSCKKLIVKYKGKTVTKTSNKNGRISYKIKSSGSKHSLHVKFKGDGQFKSSSKYHKFYITTFSPLKIGNSKLLTNGYLRIYLNGLTKSSISKKTIVIKVASKKFSKKSSSEGIVVLKPNVCAKAYTVSAKFGKYVVYKKMKCIEGNVKDPLKYNIPTKSGVPDIDVMPGNYVMGDNNARYTLTKIQYNEVIKRDSYCLFLNNKLSKYTFFKTKNNPNTNHIIQREKWNVIERAINLKIVGKNKANYWLSEISVLLKGKSYKYPEVRKTQSTNYYCGPNSASVCTQVLKNYYCEKYLAKLMGTNRREGTKCQWIIDGLNKLGFNATYFYKASFDNALNELKKGGAALVFHAPRHYVSILDISSDGKKVLVSNSYGSYDNIPTKWTKISYMKTKFSKWEESVIVRSNYKLSDSVNDSVNCFYNSMGTNWYRHSTSQKMGLV

SEQ ID NO: 10499 - protein, 429 aa, Methanobrevibacter gottschalkii
MVEENSNMLLGVRDKPPALRWVLLAIQHVCAMFGATILVPIVVNTTAGADVLSIPVALVTSGIGTLIYLVCTRGRSPVYLGSSFAFIAPMVAGYALAGKSSVFSALMLVGLVYVAVSCIIRISGKAWINKLLPPVIVGPMIMVIGLSLAPTAISEIGLDLAVVPWKNLVVALIAFLTTAFLAVRGKGILRVIPFLIGIIVGYIAAAALGMVDFTQALTANVVEIPKFYLPFMNYNLNFAAVLTIVPIALVTMVEHIGDHKVLSEIIGRDLIEDPGLDRTLLGDGLATFLAALLGGPANTTYGENTSVVGMTRVASVYVIALAAIIAIIFAFSGHLTSLLTAIPAPVLGGISVLLYGFICVNGLKILIHNQVDFNNTKNVVVAATMLVLGLGGATLSVVYGNLSLAMSGMSLAAVIGVILNLVIPEEKHE

SEQ ID NO: 10500 - protein, 208 aa, Methanobrevibacter gottschalkii
MNEFVLNHPLITHKLAFLRDINTGTKEFRELVTEISTILVYEAMRDAQLEKTTIETPLEKMETGTLNENNYAIVPILRAGMGMIDGVLNVIPNAKIGHIGLYRNEETFEPVEYYYKMPEGIKNREVLVVDPMLATGGSASATISRLKQDGVTKIKLLCIVAAPQGIETIENDHPDVKIFCATVDRELNENAYILPGLGDAGDRVYGTK

SEQ ID NO: 10501 - protein, 330 aa, Methanobrevibacter gottschalkii
MVSKEFIEKEWIKAYNALNPFLDVNGAYELRKLLCDLRNNEKFIFISDNVDYTCIIELDELKDDIPIFKYASDCFKIFGIFSKSQLSKLHFASVYDIIVYSCVSELKRDLSYNERKKIYYCNLIHKLTLNQDISSNFNQNFKYNNELFNQMKKIRWNSSANKLKNIIYRDLMGTLTLELNTDSGVTSSFGECAEYLACCNVFNDNRLEVMPDDVVKSWLLTLNLFLMDLRPYIKDFNSASDMIADTGSEFKPINISEGQSNNKSSSIIRKVLAGVLSIIIVFLLLIVMSTILILIFGDALDNFIGLLRPVGIIGLALAAALGKKIYDKLV

SEQ ID NO: 10502 - protein, 330 aa, Methanobrevibacter gottschalkii
MFEFYYEKDIQKNFGDLDKFDDVLNLFELKNLINDFINNEKYVFIIENIDFEMFETMEKSRKYSTFINNAFNGLKSFKYWIQPSIMNFNSFTSVYSIIVYSCIIAYGRMLSNDELESIIFSDFPIKLTLVMDDFYNINNVPLLDKDFFRTIRDVKLDKSAKKLDKFIYHGFLLNLAEPGNHYVAVVVEFSYCASYFSRCYAYSRKNKFVTINDIADGWILTFKLFLNDIRGYIDGLESNSPCAIVPSLKSHKKIKVEEENNGSFNIKKIIAIFLSILFFCFLILVVEDISYILTGSYYYSGAPTTRYAIFGFILFLTSMFYSLVKNILKF

SEQ ID NO: 10503 - protein, 329 aa, Methanobrevibacter gottschalkii
MFDYNFKKSIEKNFNELEKFNYLKNFNELKNLLLTISENERYIFISKNIDFNAQPLMDKPKNHSKFIINAYNGLESFKYWIKLSIMNYNFFVGVYSIIMYSCSCSYGRPMDIIEFEHVLNSNLPYKLTVYLDDFDKYDDFSSLSEEFFRTIRDMKLDKKANEIEKIIYRKFWSNLTINYGTENRVDVQFAYCANYLSRCYAFNRGRNVVSVEDIADAWILTLKLFLNDLRPYIRGLESNSPCASLPSVNSYKNIEVDNDNGSVNVKKIFAILLSILFFSLIIMVFQYTANLLTGDYYYPNSPQDRYVLAGIFLFPTSMFYGIIKKILKI

SEQ ID NO: 10504 - protein, 330 aa, Methanobrevibacter gottschalkii
MVQFPQKTIDEWINEDYEKLDVFMDADSMEDLRELILSFKYDDKFAFLSENIHYQTDINNYSDNNNLYLDANDVLGDFGFIFSNSHLSSVCIDSLFFVIECSCIGELRRELSNIEKEKVYYSDLGYKLTLGQENFLKIKNYEVINKTFFKKLSKIKWSSNSKNLDKYIKNFWDTITLQYDTYYHIVSSFSVCANYFACCRALTSGRLEVSNEGVIQSWLLTLNLFLMDLRPYIKDFNSASAMISDTGSEFKPINISEGQSNNKSSSIIRKVLAGVLSIIIVFLLLFAMSAILILIFGDAVDNYVDSLRPVGIIGLALAAALGKKIYDKLV

SEQ ID NO: 10505 - protein, 319 aa, Methanobrevibacter gottschalkii
MKQENTYSPVSSLFSKQLNLSDFGFEKPALKKIKEINKEIKPNKLLKFIKYTFKYSKIVLNKYSSHFSKHDFTQPALFTLLAVKIYTRSTYRQITDLLELSDKIQEHLHLKKVPHYTTLQKFFQRLPTSILQELNKLILQNHQITGKIIALDGSGFTNDYADKYYAIMRRKERKSYIKNHISIDVDTRLILHFAAQRGPRFDTRFAIPAIRNIKKYNPKYILADRAYDTEPIRKCINEEAKAEDQIPLKTRAKNGHYRLKSKKQFKQEIYSRRNNVESIFSVIKRIFNGTNRSRSLQLSNKETKLKNTIYNIYRSTQIQ

SEQ ID NO: 10506 - protein, 258 aa, Methanobrevibacter gottschalkii
MEKGIRFDENFISEVIFRIEFPTIKKLTGNDEEVVKDFANKISGTFPISEVIPHNKINLDIDINSGQLPKITREGDLVWIFKSHNNKKIVTLTANDLVLEYRDRVYSGFTNFLDEILLLMDAFNQFDYQKLNFLGLRYINQITDKNVNNNVSEFFSLDLTNMAIINNLEKNNENLVQIFTKVNFKKDDYLMTMQYGLFNPRFPNVDADKMFILDYDCVLHNISHVGEIKDNLIDMNHLIFDKFDYSITAKFEKIIKGE

SEQ ID NO: 10507 - protein, 148 aa, Methanobrevibacter gottschalkii
MSPPEVIRDDDTYITLPASLKDEYFESKPISYSKYFESFEFKFNELSNDFNLINIMEIQDFILLHDDLFDYLSQIKLLLQKYFSEYDYCLEFYSDPEIQSLNQLVIYINGDESSFDEDWSSLKRMNSEINDLCNFPNSVKHLISVDLW

SEQ ID NO: 10508 - protein, 424 aa, Methanobrevibacter gottschalkii
MVVKYLPRILDDDLEKCLTMIGAILIVGPKWCGKTTTAEQHANSVLKLQDKDNYKSNMMWADIEPSRLLKGDKPRLIDEWQVAPVLWDSVRTSVDESEDYGLYILTGSTVVDEDSIMHSGTGRIHRMLMRPMSLYESGESNGQISIMDLFNNPDININECESDLTIDDLIFAACRGGWPDSLNQKTREGKLFVAYNYLENICNTDVSAVDGVKRDPDRVRLLLRSLARNNSTLAKDQTIIDDMNANFMDISRPTYYSYVDALKRLFVIEDNRGWSPNIKSKSAIRSGNKKVFIDPSIAVAALNANPESMINDLNTFGFIFENLCIRDLSIYTNSHGGKVSYYHDKSGLEIDCVVHLRDGRYALIECKLGNDGIEEGSQNLLKINGLIEKNDKLDNPTFLAVLTGGKYAYTRPDGVKVFPIGCLR

SEQ ID NO: 10509 - protein, 31 aa, Methanobrevibacter gottschalkii
MVEKQNLSTTEEGRASISERFLEKLLGKIHS

SEQ ID NO: 10510 - protein, 73 aa, Methanobrevibacter gottschalkii
MAETTDKVIVIVGYLLAIFIPILGLIAGIVLYFVKKEDPFYQKHAKYIIIVSIVVWALSAIFVGMLNVGLDGF

SEQ ID NO: 10511 - protein, 371 aa, Methanobrevibacter gottschalkii
MNKSDLKRDFYMLKGPLAKKGYDWWWHSLTAYDKETGEEKPFFIEYFVCNPELAEEEPTLGQLPENQKAGKKPSYCMIKAGTWGKNAKQIHNFYSMKYFECPDDELNIKVGDCSLTETHMSGFARVSEEESRDHPEYMSDAGDMMWDLDIDKQIAFNVGYGANGLFRKLNSFEMFWHAEGIKTQYSGTIWLDGREYEVIPEKSYGYADKNWGGDFTSPWLWISSCNLTSLKTGKKLNNSAFEAGGGRPKAFGISIPRKLLIGFYYEGKMYEYNFARFWNMVKIDFDFEEGEDVHTWHVNASNKDSKMELVLYCKREDMLLINYEAPTGKKLHNRLWNGGNGWGEIKLYKKDGTLIDHVKMENTGCEYGEYC

SEQ ID NO: 10512 - protein, 232 aa, Methanobrevibacter gottschalkii
MVFTDIIALIVVYIYVAIIFVVAEMVLKTRPEISRKFLHIMVGNMIFAMPFFANPWNMVWFLTLPITIALFFLTDYSPIKIENSVTESGHALGLFFYAGIWTILIAIFTIIAPASDSKLFLWIVALAIVPMVYGDGFAALIGQKFGKIKYTVFGGTKSLEGSLTMFVVTSVMGVFVWMVFYSIGCTMPEFNIVSILAISAVATACEAFSYGGIDNLTVPVITSILYFLVAIL

SEQ ID NO: 10513 - protein, 139 aa, Methanobrevibacter gottschalkii
MKVKLIEKFALGAFVGCFIVMCVMVLISLYQGPQNIRFSGIDIINSFFGSIVAGWGFTFSGFIYDKEDLPLTFQVIIQMGVGMTILLLIAIYLKWMPINLGIGPIVTWIAIACIFAIIFWFGFYIYYYLVARDLNNKLK

SEQ ID NO: 10514 - protein, 592 aa, Methanobrevibacter gottschalkii
MDNKKIFLSFILFILIAISVSAVSAVDADNATLAEDAIPTDADVVQTKVNNANSGDTITLEDKTYDFANQTVTIDGRDKITIRGTGNTIIKGHGGQNSKTGALFIVSESIGVTFKDITFIDTNPNNNFTYDGNVEGYGITFDGSGAENGVVDNCSFADFNTAVNVKSCNYVTVKNSKFSGGYATKLINDPTVNKEKGSKVVSAGGSLFLSVLNCTFDGPMLDAVSIYGGSGDAKIIGNTFKDNVYAIFFGGASTEGTFINDNTFIECGQFVKDANTTWGGYPVISIEKASDSVYMNNNTFYAVNNNKLIAAESANTAHGAPSTLGDINITNSNVNLANDNVVAGSVTFLHILSRTGDINPKAPITLTGNKYAKGVKAVVVWYNDWGVEDSENIVIPQAPEPTPAPVAVSTSISSANLAIYAGNSGKIKLTLKDANGVAVANKTVNIVIDGVAKTVTTDDNGIAILSVKYSNSGTHYATLAFTGDNDYTGSIKTVKISVLKKVTALTITKKTFKVKTKNKKVTTVLKSGKTVLKYKKVTLKVKGKTYTAKTNSKGIATFNIKIAKKGTFKALTKFAGDGAYKAASKYSYVYVR

SEQ ID NO: 10515 - protein, 216 aa, Methanobrevibacter gottschalkii
MDLIGGYLLVILLLFTANIALILGDYKLDNIKLVALSSICFIVSFILMYASSFLNVSLSFLIDTFSYVFFIIFLALVVVIIKYIKNNNFKHALYLTLVTFLITIFLFASQSNLNVFNIIVYSLFIFIILFVVYQLSKLLHHAKMQYNVITSEYMFLFSIVIFIFALTYDSTKSLNYTSFKAFLILTPTYQLIYVIIAFVVILIIGVFINEIKGGNS

SEQ ID NO: 10516 - protein, 213 aa, Methanobrevibacter gottschalkii
MIIQGTETLTSIIHIFSESLLTPVVVLLVVSGVIIILALGGLINEYISRKPISSNDLENLVRRISFSNNVDQMKSEITNSNLFNYQKEILIRIANNYDIGCDARKAFASELISAEETILIKKTNKTDILVRVGPSLGLLGTLIPLGPGLAALGTGDIATLAQSLTIAFDTTVTGLTIGALAFVVSKYKKQWYEAELIDVETLAETELEVINNW

SEQ ID NO: 10517 - protein, 99 aa, Methanobrevibacter gottschalkii
MLRKKRRISESVDDDPMGGLNNLSDAMLVLALGFLIFAIMALSVNPDMITEQTQTKEVSTANTFTQNYTDAGGLEDSGYSEVGKVYEDPSTGKLVMVSG

SEQ ID NO: 10518 - protein, 133 aa, Methanobrevibacter gottschalkii
MKMPETLDSKLLAPCGINCISCEKYQNPCSGCLISNDGKSKASLKCKIKTCFDSKSFSYCGRCSEFPCPLMKKHSKKYVKRHDLNTLESAKRIKTTGIGRMMSQDHDEWLCPECGGVIKFQTKKCSECGIKKE

SEQ ID NO: 10519 - protein, 246 aa, Methanobrevibacter gottschalkii
MSIIISPEFKKLKNRLSDLILIHHELLLQICPNIEREYLLKFGSLEYELYKKDVKLSMLKRKLQLIQIQISTEEEIDIELIDEILEEEFFKYKENIKKHMDELNGAMEEQHICLLSKKDTKRLKLIYKQCVLKLHPDLNPNLSNREKDLFIQITEAFKNGNLNALESLYYFVPNKKVEFESEIERLQELIECEEKEIAEIKEKYPYNKKELLLDDNEIYEYEVMLNNLITQFDDDIQRCMDEIDLI

SEQ ID NO: 10520 - protein, 185 aa, Methanobrevibacter gottschalkii
MYKYIRDAWKNPDESYVRELMWQRAPKWRRQKVVQRIDRPTRLDRARSLGYRAKKGFVLVRTRVRRGGRRKTRRFNGRKPKRMGVNKITQAKSLQRIAEERVAKKYPNLEVLNSYWVWADGKYKYFEVILVDPQSPSIVNDKKINWICSKKHTNRALRGLTSAGNKGRGIKSKGKGSEQARRRKL

SEQ ID NO: 10521 - protein, 140 aa, Methanobrevibacter gottschalkii
MIHNIKFRAFVYENESVDEISQAILNLLPEAEINVEEAEGLLEDRILILTGVVSKKRYTKTFFNKLLESADLDKLNNDLECKMDEKGNWFLRFDKTDALDEKLTILDKGDSIHLKIKIAAFPAKKQIAVDKVRKAISGCV

SEQ ID NO: 10522 - protein, 125 aa, Methanobrevibacter gottschalkii
MEKQSKILIVLLIVFLICVGVFWFQFNNNVSTFMIVNETHVTENSSFSGMLVDSYGNGVANQTIAYHEPGGNVGTLTTDENGEFTVELAKYLSNSTSDNYYGDFKFSGNGKYQGCAYEGNVTVGI

SEQ ID NO: 10523 - protein, 396 aa, Methanobrevibacter gottschalkii
MTDLPWGNNQNLTDEEFYNRESELINIKNILHSTGQGHAPDLLLTGIRGVGKTVFLKKLKRELDGEYLVVYIDFSKSKCYQKNQMSIIGLMGHFFKELILESKNKGLNTLDKQIEKYFKSNDFKIREFIRLDKIPIPIFSKETNEEKLIDFALNLPEKIYDENQDKIKGVLIFIDEFQIIKELNNYKESFLWKIRSYIQNQRNIAYIFSGSMSLQDKLISEIASQNGAFGGRMISININPFEKETVRNYLSKKTPYIQFTDDGFDRFYKFTSGVPSYVNIFASLLPINEQLDDDAIKMYFDKKIQAISSHLINIWARLSFREQTIIITLLEKPLRRIDIANEFGISTGSLSNYLNNLQNQGLISLNNGLYEIAEPILKRWLELEFKEKGIYPYRNI

SEQ ID NO: 10524 - protein, 115 aa, Methanobrevibacter gottschalkii
MKGEVFYGKGIRELEGEYPDLYELVTDINDTVWNGKVLDYKTQKLIAIGITASRADPRAIKKQIRSAIEVLGITKEEIVDVLRVVLLTSGMPAFSKSLQILNSVTAAIEEEKQEE

SEQ ID NO: 10525 - protein, 310 aa, Methanobrevibacter gottschalkii
MNSNKKFFSRIGFNYLIYAVFSLVITMILANIIAYTSPEILNNINTSTTITAICNYILPLPVFIYLMGKLDSKKLEIHKINARTFLKYLCITFTLMWIGNIIGVIITTALSGAIQSDISNPIQDLINSTGIWLNIVLISIIGPVFEEFFFRKLLIDRTIKYGARTSIVLSAVMFGLFHGNLNQFFYSALIGGFFAYVYIKTGKITYTILLHMIINLLGSVVSLFLNSSVTNLITGTINPFDLIFVLLYLAILIITLIIGLTNLLNYKQAKFNGQKTEISLQKPLKTIFLNLGMFCFIIFFTIKMVLQVIN

SEQ ID NO: 10526 - protein, 88 aa, Methanobrevibacter gottschalkii
MVHRNILKKCVEHKHALLFAAGIATAVVGKKVIESKSVKNAATKGMANVMSIKKDAEECFQDMKENAEDIVVDAHKEDKKEIYDESQE

SEQ ID NO: 10527 - protein, 709 aa, Methanobrevibacter gottschalkii
MKYEVVYDNGSRLRVRSGQWAFTKEEGYGLASLLLNQNFIHEVLTSHRNGSILMYYDEGIDNKDKIFDILDKIGLDDLFEAEPTQIQISKEISEDFYKKIAKMILNRGIYKLFLPIPVRNALTVYHAMKYIWNGFDSLTSFNVDVALLDGAAVAGALLNKHYKPASSMMFLLSISDALEDYTLQKAKSTLKDSLALNIDTVWVVGEDGEEKQCSAVEISKGDKIKVHMGDVIPVDGKVIEGEGLVNEASMTGEPLAVHKMNGKTVHAGTVVEEGNLIVEVYSMNKETRLNKIIHLIENSEELKAESQSKAEKLADSIVPYSFIATALTYFITGSPTKALSVLMVDFSCAIKLTTPLSIISAMREASDNRMMVKGGKFLENYANADTIVFDKTGTLTNAAPKVVDVISMSKKYDCDEILRMAACIEEHFAHSIATAIVKEAEKQGLKHEEDHSEVEYIVAHGIVTEYEGKRAVIGSRHFLFDDEKVKVTKSQEKKINEKIKEHSVVYLAIDGKLEGIICIDDPIRKEAKYVIEELKSLGIENIIMLTGDSESGARAGANALGITDYRSQVLPEDKSRIVEELKAEGRIVIMVGDGINDSPALAAADVSVSMKHSSDIAREVADISLLSDDLYDLVTLRKLSTGMLDKINNNYHNIVAVNGSLLVLGVLGIIPPATSSMVHNLSTMLFGLLSTRSVLTDEEYIKDIEVKAI

SEQ ID NO: 10528 - protein, 249 aa, Methanobrevibacter gottschalkii
MLDNYKNKFIPLILPVVLIFFWYIITNALALFSSYILPGPLDVVNSALVVIENGKLLTNTIDTLYKVFAGLILASIVAIPLGIVLGWYKTLEDICTFVISILRPIPPVAWIPFSILWFGIGTFPAVFIIFMGCVFPILVYTIDGVKRTDKVLVESAQTLGANDWNILRRVVLPSTIPYIVSGLKVGIGIALMCTISAEMIGSSSGLGYMILIATNLFDTGTTVVGMVVIGLIGLVFDFVFSRAQDKIFW

SEQ ID NO: 10529 - protein, 250 aa, Methanobrevibacter gottschalkii
MSIEVKDIYKKFETKKSENLSVLENINLTIDDGELVCLLGPSGCGKTTLLRLIAGLDTPTSGEIVANGEVVKKPSGDRAVIFQQYSLFPWLTVLQNVTFGLEMTKPGSKEENIAAAERYLTSVGLIDFKDSYPHELSGGMKQRVAIIRSLLNHSPILLMDEPFSALDMQNRHSLQEQLIGVWKRFENTIVFVTHDVDEAIYLADKIVILDKNPGRIANIVEVDLERPRKRESQEFLALQESIVSQLNMDE

SEQ ID NO: 10530 - protein, 123 aa, Methanobrevibacter gottschalkii
MNRDDLEDYIEDNYSAEPEFPWLKFPNYEVFRHDDNRKWFALIMDVSKSKLGLDGDEILDVVNFKCDQILIDSLTTEPGFFPAYHMNKENWITVALDGSVSDEKIIMLLDISFELTASNKKID

SEQ ID NO: 10531 - protein, 270 aa, Methanobrevibacter gottschalkii
MNILISNDDGVNAAGILAAKQAVEDLANVYVVAPDKNNSSVGRRISLFKHLKIDSCELEDGSPACSVSGSPADAVIVGADYIMDEKPDLVITGINQGLNISCDITSSGTVCAALEAVSLGIPAIAVSLFIDPKTSYKQDENGEWYMDYDFNFAKKVLHDLVLKIIDEGFPKGVDLFNLNIPTNYKSQEVKITYLSHKMIDKKVIDNTNEEKKELFNYPLDENQESDDLIMIASDLIKEYEEGSDGYALLVEKCPSLTPLNVNMTSKKLNW

SEQ ID NO: 10532 - protein, 244 aa, Methanobrevibacter gottschalkii
MIVMSIAGVDPSAGAGIYADLKTFQAIGVYGTGIVTALTAQNPYKFFSASPVLPEYIEEQMDSVLDSYEVEFIKTGMLYSPEIIKLVSKKIKEYDLKAVVDPVMVATSSGNLTKEDIADAFNKYLLPNSILTTPNIAEAEKLTKFEIKTKEDAFKASKRIVCNNIITGGHLDGLNTINIDGEITTIKQELIKTDNLHGTGCNLSSAIVAYLAKNNELDTSIIKALNYVYEGIKNGNYGTLIAKI

SEQ ID NO: 10533 - protein, 223 aa, Methanobrevibacter gottschalkii
MDNIYAIIPVSKFKNAKTRLSPFLSEEEREKLLKVMLQDVTDTLKKHVDKIFIISRDEDVLKYAKSLNLDTILENKDSNLNKALKQAMKECKGKVRKVIIVPSDVPLIGKTNISILIEASKNLDFIIVPSKGGGTNMIIMKPMAIPTKFEGFSYREHVNVAERKKLNPQVHDSFFMALDVNTAQDLGEIMIHGEHTHTRKYLKELKVKVEPYRGTERLKVTRG

SEQ ID NO: 10534 - protein, 467 aa, Methanobrevibacter gottschalkii
MVENFDEWFHDILENANITDSRYPIKGMAIWMPYGFQIRKHSMNIIKKLLDKDHEEVLFPMLVPESELAKEGIHVKGFEDEVYWVTKGGQRELNEQLALRPTSETAIYPMYSLWIRTHMDLPIKYYQIVNTFRYETKHTRPLIRVREITTFKEAHTAHSTKEESDEQIQDFIAIYKEFFDELGIPYLISKRPEWDKFPGADYTMAFDVIMPNGKTLQIGTIHNLGQTFAKTFDITFEDKDGEHKLVYQTCAGVSDRVIASVIGIHGDETGLRLPPKVSPNQVTIIPILFKKGKEEVLAKCAEIKAQLEETGLRVNIDDRDIRPGKKFHDWELKGTPLKLELGPRDLENNITVAMRRDEGKKIEIALDSSLSDNVIDLLNKTQENLSESAWNFQKSHVKFTERLDEIKDLVETGNVVKFHWCGDEAIGRDIEEKTGYDILGIQEEISEGECISGKGNAKYIALMAKTY

SEQ ID NO: 10535 - protein, 347 aa, Methanobrevibacter gottschalkii
MTNRKIQMPREVYIDPGIVHDTAEICNSLHLGNDFLIVTGSHTYDIGARPVIESLEKNNLSYDVIKVDVASEESISEVEELITPETTVLGVGGGKVIDVAKLSSFNQGVYFVSMPTTASHDGIVSPLASIKNPNTSISATAHSPIAVIADSEIIAQSPFRLLAAGCADLIANFTAIKDWELAHRLKNEAFSESAAALSIMSAHLITDNIANIKPNLEPSARIVMKSLFSGGMAISIAGSSRPASGSEHLFSHALDKILDKPALHGEQCGIGTIMMMYLHGGDWRVIKNALESVQAPTTAVEVGISDEEIIDALVMANKIRPERYTILGDNGVSREAAYELAYKTEVI

SEQ ID NO: 10536 - protein, 145 aa, Methanobrevibacter gottschalkii
MITLIGKDLAKEGQEFVFLGPADECENCRFKSSCVGNLELNRKYVVVNVKENEQKCPIHSSGLVIPVEIDRAQIDVLTASKNIFEGSTFTFNAPDCDEVCEFHDLCFPEGLQEDDKCLVLNNNGKHNGECKKGFKLNKLTLGFVI

SEQ ID NO: 10537 - protein, 229 aa, Methanobrevibacter gottschalkii
MMKNTSGNSSSKKNAGYKAAEYVEDGMVLGLGTGSTTHFFIEKVGMRIKEEGISIKGIPTSFQSLLIAKQWNIPITTLEENDIDLSVDGADEVDREFNLIKGGGAAHTKEKIVDYAAKQFIVIVDESKFVDKLGDFPVPVEVLPDASRMAIKELEDMGAECEIRMAQRKDGPVITDNGNFVIDAKFDKIESPRHLEIDINTIPGVVENGIFTQMVDKVIIGTDEGTKEL

SEQ ID NO: 10538 - protein, 73 aa, Methanobrevibacter gottschalkii
MPIGAGMPFDLKDMSYKIAIIFGALLVIYGVLWLLAELKIIPAILFVIFPQIVLILIGICIIYFAFDRKKKYY

SEQ ID NO: 10539 - protein, 994 aa, Methanobrevibacter gottschalkii
MNKKGYILVISLVLIMLFCLSTVSAKDTDLNANTLEKSNDVTILNEGDSNVSQIHSQHTVKVGSDSDSIQNTIDCMNDGDILNFETGTYKDICIYVNKSITINGNGAELIGYDTPSKSNTPEIIYNDTGKGGYAIGNFATLYIVKADNVVINGLKITGGANSTSTYSNALIYAMNSKNLTFKSNVLEGSSWGLYFQYCTDGHVTNNIIKNQAVTGFLNFGSARTSIENNKVINAKNHGIDVRHGTGPNVKIINNTVIGSKEGIYLMHSTGHVAANNTLINCTISSISCYGSKNIKLNGNKMQKSRIGVLLGGGYENITVGENMFTLDNLPYPPTFAYYIAEAKSEYQNDEDIMGTFSDSSLYTPNFVAFTGIDVPKDIGINYDPILEKTGPEWIVPEGASSSEIQNMINNMNNGDTLSFTQNAIYNEISIYTDKNIKILGNNATLVGCSGINFNNTHYLDNVAEKVRKSTNEGGYAIGYNAVLYILNTTNVVVSDLNIKAQYPKYDSSKVETTTNEYKTVGIYADSNSGLVITGCDVTGASWGIFQQYCKNSTIIRNNIHDIYTTGIMNFGSPNGIIAGNTVTDAANHGIDVRHGTGPNVTIFNNTISGAKEGIYLMHSKGHSAYNNTILNCKISGITAYGSGNEVLFNNTISGSRLGILLGGGYYNITIGKNTFKLDSLPFPPTFVTYLARADNKYQSEDDVIRTYSDKETAAVDANDITVGYKKGEFNITLIGQNGDKLSYEDLSISINGANFTAKTDEKGIAVIPLSLTTGIYNMTIKFAGNDNYAPINVTKTVTVNDDRIKTILSATSKTLYLTIISKGYSYKVTFKDMNGKAIANKKISFKIDGKTYSATTSSTGIANIKIKATTTGNKKATISFKGDDKYAPVTKTLTVKVIKQSSKISAYKKTFKVKIKTKKYTITLKNNKGKAIYKGTVYIKVKGKTYKAVTNSKGKATFKITKLTKKGKFTATIKYYGNKYYSSTSKQVLIRTRR

SEQ ID NO: 10540 - protein, 571 aa, Methanobrevibacter gottschalkii
MNKSLNILFICFVALLVISCVNAANDNPNNSDDISNYQISSDLSNTEIQTMLDNAKEGDQFEFTDREYKNISLVVDKKLNIVSKKNSNIHTSNKIADKARNLGLNNSFGFYFTSNSGGSFLYGLTIISNSDYGIVVDKSDNTTIKNVVIKNGNVGILVKNSNNADIIQNNISKANSNSIHLENVSKSIISKNTISYNGRSGIHASNIYYCNVTNNTVHHNKFNGISLYNKTTGNIIKFNLAYENPNGIYINSQSDFDVVNSNTFTKNRRNTDYELGAFESGNGLLFGADFKTAKEGKSSRLEVKYNVLTHNEGYQAKNNPDLPTFKLGDNWFDSTDDENTFVCPMLLAGIMKMGTISVKNGFGLQMYDTNGEAVTEFGTFDTTVNVNGNQYTAKFVNGKAIIDANLDPDKEYEIEVIIGDKPVKFTYRTSSGDKNDESDSQTSTDGDFGINHHDFIDAMGNDASKGVGNSENGTSSAHFANSEQSGAHGTNASGNFQDSSDNGDSVLTNGNANAGDSSKGEQSEEGKAYEIVPQSKISKEITDTSGIIVLSIVSILGMIIYGYWRKPEIEN

SEQ ID NO: 10541 - protein, 134 aa, Methanobrevibacter gottschalkii
MKVKSVSLKISSNEKFEIIDITSKINELIEIDEGIVSIFSKHSTSAIVVNENEDGLLKDLEVSLDDIISDKFSYSHDMIDNNARSHLKSFLLSSSENLPIKNGRLDLGTWQSVFFVELDGPRYDRTIILTMVGE

SEQ ID NO: 10542 - protein, 552 aa, Methanobrevibacter gottschalkii
MPVITFKYQDLKDLGINMEKNELIDTLPMMSSDIEDFNDEEIKVEFFPNRPDNLSVEGVARSFKGFIGQEVGFPDYKIEESGEYVIVDKDVAAIRPYIGFAKINNVDFSGDKLKYIMDFQENLHWVIGRDRKKVAIGIHNADAVNGPFKYIATPKDANAFVPLEKDIEMTPDEILTEHEKGKDYAHLIRNFDKYPLILDKNNNVLSMPPIINGELTKLKEDTHNIIVDVTGTDAKAVNQTLNIICSSFAEVGGQIKSMEVKYEDKTLVTPDLTPQEMNVHVDTANELIGGTDLTAEDIRELLLKARFDAEIISENEIKTIIPSYRVDILHEVDIIENIAVQYHINDVIAELPDINTVAYENNWFKSEATIREVMIAMGFQEVMSLMLTNEEAHYKKMNQEEKPHVQVARPITIDRTMIRTSLINSLMEFLEDNKHEDLPQKIFEIGDVLYLDETKENKTVSSKKLAALVCHSTANFSEIKSIMSSVLSNLGYTMDISDSENKTFIEGRAADVVGEAQKGIIKGFFGEVSPEVITNFTLDYPVIGFEIEFINK

SEQ ID NO: 10543 - protein, 118 aa, Methanobrevibacter gottschalkii
MQMIWFYVAIVLAISDILHTTLMWKVLNNFYILLGVFIQQSTHSTWQTWVIHEIMEAAFHFIILSIVFLNPTIGLLAALIHFVIDVSHTVLIRNMGELEHRALHFVVESLFFILIYGL

SEQ ID NO: 10544 - protein, 903 aa, Methanobrevibacter gottschalkii
MSNEEIPKDYDFKKEKFWEKKWEDEDIYRYIGDGSRPRYIIDTPPPYPTGLIHLGHVLNWVYIDMNARYRRLKGHDVLFPQGWDCHGLPTEVKVEETHGIKKNDVSRAQFREYCVDLTTKNIASMKSQMKAMGFSQDWNREFITMTPEYRKRTQYSFLKMYEEGLIYQGIHPVNWCPRCETAIAFAEVEYSDNTTFLNYVNFPPAVDDSYDDIVSSQSSGKQASPNDEGILIATTRPELMAACVAVVIHPEDERYTHLLGKYVEVPLSHQKVKIIADEEVDPEFGTGAVMICTFGDKTDVSWVNKYDLEIIDIMDETGILTEAAGRYAGMDLPSAKKQTIEDLDAEGYLLKQEQVDQNVGQCWRCKTPIEILVKKQWFVAVRELIKKTKDAAEEMNWVPEHMKSRMVNWADSMEWDWCISRQRIFATPIPVWYCKDCGKVILPDVEDLPIDPTQDKPKHACECGCEEFIPEEDVLDTWMDSSISPLSIAGWPNEDYINHFPADIRPQGHDIIRTWAFYTTLRCLALTGQKPFSDIVINGMVFGEDGYKMSKSRGNVIGPEEVIEQYGADALRTWAANSVPGSDVIFDWKDIKHGYRFLRKFWNAFRFISMQIFDEKVSYDEIKDDLGPLDLWILSKLNNLNKNVDKAFAEYNFADTISSIEGFFWHDFCDEYIEAVKYRLYTDVSDESKRAAKYTLRCVVETSLKLLAPIVPFFVEEVYQYFDNQSIHTTSWPEVIEELISEEMEVKGETTVELIDEVRRFKSASKIPLNAELSEVNVYTSNNDLIDVFNQFDDDIKGTLKINNLEISSGKPEVHEKTIEVEPDMSQIGPKFKGDAGKIIGYLKSTDIEEIANVLDESHELTIGEIVVPEDMLNIKKEIVGASGKKVDILQSENLDMIVEVIR

SEQ ID NO: 10545 - protein, 209 aa, Methanobrevibacter gottschalkii
MRYLVHVQEAVSENKKLILLMSVIFIISVAVGFIFQDIIYKEISPIFEKMVREFVNDPNSNLGFEIFINNIRASLLTYVLSVFFALMAVFSLILNGIILGAVGGAYMSADPVYNGIMFLALILPHGIFEIPALIFSSVAGILLFKFIFKYLKTFVKRDDLSLKEILDMHKVIIKHSIILLILSFVLFVIAAAIEGNFTGAFAKWIQTLF

SEQ ID NO: 10546 - protein, 54 aa, Methanobrevibacter gottschalkii
MTKIKIRLFGIVRNLGLLDLCVHFYPELNQKTTECKKIGDIIHNRNIKIKFESI

SEQ ID NO: 10547 - protein, 134 aa, Methanobrevibacter gottschalkii
MGLLDKVVGHAEVGGDTQIVEEYLAPGEEIIQSFHFLRDAVILTNYGIYDIDVQGLSGKKVQVKFYPKKTIKTISFESAGSFDFDVDIKIGVSNNPVVLMEGGAMNMPISFKVPKAQAEEAKQIIHLVKEHYLL

SEQ ID NO: 10548 - protein, 438 aa, Methanobrevibacter gottschalkii
MILKVKNISNIGGEVKAPPSKSYSHRAVILASLAKGTSKLYDMLFSEDTLASIRVCKALGAQINKKDGYLEVIGTNGRLHNSCDGPIDLANSGTTLRLMTSVSALSDNEVILTGDESLKTRPMGLLMDALKPLGVETESLNGDDKAPILIKPGYLGGETNIMGNVSSQFISSILISAPLSKCGVNLYVLPEFKSKPYVYMTWDIMRKFGIRSVKAYYLKHDSCNQEHQSCRIDEFKIKKQEYIACDYTVEGDYSSASYLLALIAINGGSARVKNLFRTSKQGDKFILDILQRMGATIVRGDDYVEITSKGNLKAIDVDLSNAPDLLITVAVLAAMAEGTTNITGVAHARVKETDRIDTTCRELEKLGCCLEEHEDGMSITGGVSSGVVDSHGDHRLAMAFSLIGLKHDIKITNGEIFDVSFPDFIETMAKLGFELELV

SEQ ID NO: 10549 - protein, 209 aa, Methanobrevibacter gottschalkii
MNKEERIIRLVECLDNTFEIRTFQNHDPYQVLIRTILSQRTRDENTDQATNNLFSKYKDIYEVAEAPIDDVKELIRPAGFYNVKAARIQEVSQILIDQYGGEVPNTVEEMIKLPGVGRKTANCVMVFAFELPAIPVDTHVHRISNRLGLVDTKNPEDTEVELTKIAPKDLWIKLNDLMVQFGQNICKPMSPQCEICPCSEICDYFKENI

SEQ ID NO: 10550 - protein, 315 aa, Methanobrevibacter gottschalkii
MVNVPELKRGVLDSVVDAIGNTPIIKLNNLTKDLDAEIDVKMEAFNPTGSVKDRVAVAMIEDAEEKGLLKDDSVIIEPTSGNTGIGIGFAAAAKGYNVILTMPETMSVERRKLLAIYGAEIVLTPGSEGMDGAIAKAEELHRENPNSVILGQFDNEANVAIHYKTTGQEILRDTEGNVDYVVAGVGTGGTVTGIGKALKEVLPDVKIVAVEPEESQTLAKGAKGPHKIQGIGAGFVPSIYDSDVIDEIIPVPSDEAGKTLIALAKEEGIFAGISSGAATWAALQLAMRKENKGKRIIAILPDNGERYLSVEWLFE

SEQ ID NO: 10551 - protein, 237 aa, Methanobrevibacter gottschalkii
MFNNLRAEIKAIKEKDPAARSTLEIFLCYPGFYALLMHRISHWLWNRSLKLLARMNSNLARFITGIEIHPGATFGKRVFIDHGMGVVVGETAIVGDDVLIYQGVILGGTSTEKTKRHPTVEKGVIIGAGAKVMGNITIGEYSKIGTGAVVLKDVPPESTCVGVPGRIVKRKGVPHEKVDLDHNKLPDPVADAIITINKHLQENDEHIKILFDKNEICLTDDIRDEQETLEDLFKREE

SEQ ID NO: 10552 - protein, 124 aa, Methanobrevibacter gottschalkii
MKPPCEIVVWYVIPAIRSELAKELLNLGMKQKDVSELMDITQPAVSQYITDKRGSGIKLDDNVRDMIKNFARQLSVGEATKADLISTTCKICNHVKLSDVLDQLNIDKSELGEDCQSCLGSEVN

SEQ ID NO: 10553 - protein, 448 aa, Methanobrevibacter gottschalkii
MDVYSTLTRSKENFVTINKNRVNLFVCGPTVYDDAHIGHGRTYISFDTIKRYLEYKGYAVFYIQNITDIDDKIINRSKESGIPASILARKFEKRYIEDMHKLNVNGVNLFARATDHVDEILDQIQRLIDKGFAYETEDGVYFEIDKFPEFGKLSNRNVEELESHRDIVETTKKNPQDFALWKKRIDVDEPTWPSPWGEGRPGWHIEDTAITEYYFGSQYDAHGGGLDLIFPHHEAEITQMEAVSGKAPMVKFWLHTGFLNVNGEKMSKSLNNFITIRELLEDYEPDTFRFFVLSTHYRSPIDFSKESLHQSEKSLDRIRKYYELLDVEVDENKYECDVLAPHMEEFFNSMDDDFNTPKAIAAIFGLINDTKKELSEFSSEDKRAIKSFLDDASHIFGVSFEAEEVNAGLDDLLNVISEVRSELRASKQYDLSDKIRDELQKLGYEIND

SEQ ID NO: 10554 - protein, 69 aa, Methanobrevibacter gottschalkii
MLKVRIWKLLLGVLILSKSFEKEIISEDTANSLWIAMVNNGIHLPKDLFLDYCSRLYEIDCEKFLMDYF

SEQ ID NO: 10555 - protein, 432 aa, Methanobrevibacter gottschalkii
MNNKDYGLATLGVRAGQQPDPATGAQAVPIYQTTSYVFKDASEAARRFALQEFGQIYSRLTNPTSDVFEARIAAIEGGNSGLSTSSGLAAISYAILNVTGPGDNIVSADNLYGGTYQLFNYTFKDLAREVKFVNSQDLQAFEDAIDEKTKAIYVESIGNPKLDVPDFEALAEIAHSHDIPLIVDNTVGVGLVRPLLHGADVIAASATKYVGGHGTAVGGYIVDSGKFNWGNGKFDNFTKADPSYHGLVFWDAFGDVPELGNIAFTVRARARLLRDLGATQAPVHSFIFLQGLESLDVRVKRHSENALKVAKFLESHPKVNWVNYPGLESHATYENNKKYLKNHFAGILGFGVKGGEEAGKKVIENLKLFSILANIGDAKSLAIHPASTTHQQLTPEEQEATGVTPDFIRLSIGLEDADDLIEDLSQALDCID

SEQ ID NO: 10556 - protein, 401 aa, Methanobrevibacter gottschalkii
MYLDNSATTQVSKEVFEEMKPYFREEFGNPSTLYKLGRESKKALDQARQRVANAINAKPEEIYFTSGGSESDNLAIKGIVFKLAKKGKHIITTEIEHPAVKRTLQFLESLDFKVTYLPVYENGIIKIDDLKEAITDETILISVMHGNNELGTIQPIEEIGKVAREKGINFHTDAVQTFGKIEVDVEKLNVDLLALSSHKINGPKGVGALYIKKGTRLEPLIHGGGQEKGIRSGTENVPGIVGFGKACELAADQLDEHYEKLTSIRNEISDKILNTIPEAYLNGDAEKRLPNLLNFRFKAIEGESLILLLDAKGYQASTGSACSSNTLEASPVLTALGLDPVDVHGSLRISLAPESEEFDVDDFVNTVAESVARLREMSPLWNQEIDYDGVMCRKNDNCKRC

SEQ ID NO: 10557 - protein, 123 aa, Methanobrevibacter gottschalkii
MDYSEKVMDHFANPRNSRKMEDANGVGTVGNPTCGDLMTIYIKVEDNIIKDISFQTFGCGAAIATSSMITEIAVGKTLEEALKISRNDVAEELDGLPPVKMHCSNLAADGLQAAIENYYENNQ

SEQ ID NO: 10558 - protein, 123 aa, Methanobrevibacter gottschalkii
MANFVKCDKCGSILGMFVKGEGEVCSPDLLEIPVQTEGDKAPKHKPVVEVDGDKLTVKVGEVAHPMDDDHYIQFVAVEIGSELYAKCFKPGDVAEATFTIGADKSADAVAYAFCNLHGLWSSE

SEQ ID NO: 10559 - protein, 172 aa, Methanobrevibacter gottschalkii
MSSYSKLIIFILVLLFISAAIFFIDSSMDSINRTMPGVSDSIVNGDKEYNEAVQLVNDKSFDEAKTKAVSAENNYNNSLIKLNGIRNNFSSDINEVQEEYIGTVIKELELKINAVNNLKEAIDCFKINSNYTGTNYASKANDLMYEATEYQHERNSIVKNNSNLFKQQNFVI

SEQ ID NO: 10560 - protein, 760 aa, Methanobrevibacter gottschalkii
MTKEFLKLKTKCPKCKGIGSVVVDYKECKACGGTGYEDDAFNIGNHFKGVNSNAKAKFDLGGEEDIPCEACNGKGQIEVFEECSHCHGTGQINVCRDCGKSIGDQHDLCAECEEKRKLEKAKHDKFEARRSAARDVYILDSLCKMSDIDKDKLYKGRITRVEKYGAFVTLNNNVWGLMRGDNFGYNVGDDVIVYVTAIKSRERKIDLAPAHVESYNIKKLTKTFPRTLIGKLEEKKGRMVRIDGEVQQIQQTSGPTIFIISDETGSSEIAAFDKAGERSYPEIELGDAVQVVGEVNEHGGKTQIESSSMVKLNEENTAKLHKLIDDALNKKAEPQHVDFLVESDILNRLKPKMREAAQKIRRAILDGRTILLRHHNDADGICSGVAMEKAIIPLIEKVNPSNDAQYYYFKRSPSKAPFYELEDVVKDLSFALEDQERHGQKLPLIVLLDNGSTEEDIVALMQAKIYDIEVVVIDHHSPGELLTKNIQDGKIYGATVAVDEYVDCHVNPYLVGGDSQLTAGALATEVAHLINPDVKEVIKHLPAVAALGDKAECSEADQYLEIANQKGFEREHLAKIAECVDFEAFFLRFMNGRGIMDTILAVDNIDKHEKMIDALYKEYQKRVDTQLKATLPNIKRTQFENGIYFNLIDVEKYAHKFTFPAPGKTCGFVHDNVKQELGEDKPIVTLGHGPDFGVFRATDAVNEQYGFNVNEIVSKMMDSVPQAGIDGGGHECAGSIKYIEGLGEEVLSKVIGEIQSLSKN

SEQ ID NO: 10561 - protein, 297 aa, Methanobrevibacter gottschalkii
MTLENYCKKCGHRILPNNPYCPGCGCKTIYTENDESYVFTPPVHDIGFFNFSIDFSPYIMSNRDDFKYDICHCGYLNDVTNEFCYMCGAKRFHSKLARFLKNRSKPKFNLDNVLCECGAVNSKENSFCEMCGKQLHEHETKIYKSNNYSNFNLEFKNSVFCFCGEENEESSQFCRNCGLPLINYGHLSDMALLCVCSTLNDINSSFCIECGLNLKKENSLIVCVCGHKNPISAKFCQNCERPLNPKRLINSKILCSCGEILDWNTEFCPNCGKNIKNRMIIRNSINNTVKSLKSIFR

SEQ ID NO: 10562 - protein, 325 aa, Methanobrevibacter gottschalkii
MKKCDVCGTLNFKDNNYCTHCGNKFIFEHVCPYCGSINEDYANFCANCNGQINPISINDFDILFSEFNENCLLNAKISDEKYNDLLRNIFLRADFTEIHGNTIKDKILNLASIFTQCKPKSRGYERGFIFLGNYIYYDDRLDESVQIATIIHELAHYLIFSIIESLLCDIFNVKTSTTLQSFIWYFLMIPEFKIMNEYCAHTVEGRFIPYGYQNYGSFNLLVKNTSFDEDSIKTMEMFGNSFANEIIIYLEKYIGNDLRQEIKLQYKMDLKSPSYDSILMETDECFNLNDKNRMLLKILYDVFKEASNPNVICELKNIKEGIDLN

SEQ ID NO: 10563 - protein, 98 aa, Methanobrevibacter gottschalkii
MGNEKDELLKLTSYVQISKYREKTLKSIGDDVKIPTNIAKDSGIRTNHISKVLSELKSKEIVECINEEARKGRLYRLTDTGKDVLETIKVKEEKENKD

SEQ ID NO: 10564 - protein, 203 aa, Methanobrevibacter gottschalkii
MKCKYCGIENKKSAKFCTSCGKPLNESPEPTGGNSKLIIIALIAIIIILVGTIGFFVLNNNFNSHDSEIPNNTVSSQESNSANIQDSDNGGDVKTQVTSSQTTNSKSWEPIGSYSGSGSGSKTITVPEGKIKVEFSAYPIKNYATNYLTVSGSNGESGGVDWGSHSAVKTKSDSFIYTSSSSETFTIDYYETVSWEVHFYRYQ

SEQ ID NO: 10565 - protein, 236 aa, Methanobrevibacter gottschalkii
MFFDLNIKGSTLENNIKLAKEASFYGWNHINFSYNANNFLNALNFKDELNKALGDIIDFDYTLEIKSSNINDIRKSVNKFRNRSSCISVVGGDLKVNRATLENIKIDVLSRPYLRRYDCGLNHVLAKEAEKNNVAVELCFKDVLKSYLSYRSKILSNFKDIYTLYRKFDFPLVLSSRAESVFDIRTTHDFITFFKQTGLTDAEINKSFKTADNILKYNKNRENLILKGVMRVTDET

SEQ ID NO: 10566 - protein, 118 aa, Methanobrevibacter gottschalkii
MKLKVLPPTLRKNNRYLTVDVKVTCQITKDDLVAIVWDACIRFQGELNTANFNLWVMKFFEIEKRDDYYRYRSIIRCQRDYVDEVRSSFALTNRYGNNMISITTIGLSGTIKSSGKYI

SEQ ID NO: 10567 - protein, 255 aa, Methanobrevibacter gottschalkii
MQPLQNAGYDRAITVFSPDGRLFQVEYAREAVKRGTTSIGVKSSEGIVLAVDKRTTSKLVEASSIEKIFKIDDHIGAATSGLVADARALVERARVEAQINKITYSEPIRVTSLSKKLCDMLQLYTQNGGVRPFGSALIIGGVYDGVCKLFETDPSGALIEYKATAIGSGRSAAMEIFEEKYEDDLTLDEAIELALTAINEATDHDTVSNNVEIAVIKVDGEKYVKLSQDEVQKYIDEVLVEEEEEESADSQEDEE

SEQ ID NO: 10568 - protein, 233 aa, Methanobrevibacter gottschalkii
MVNIDEAIIAKYEYCGEHFEILVDPDLAADFRNPDGPDVAIEDLLAVEEIFKDSKKGDKASDEAMNKIFETTDPIEVSKIILEKGTVQLTADQKRKMQEDKRKLVINKIAKEAVNPQNGLPHPVQRIENACDEARVKFDPFTSVDQQVQTALKAIKPLIPIRFERVKVAVRLPGASAGSAYSIIHGFGEIINEEWQQDGSWIGIIEMPGGLQDKFSAKMAEISGGNAETKTIK

SEQ ID NO: 10569 - protein, 306 aa, Methanobrevibacter gottschalkii
MIYVENKDLVIPGQILADDEYYSGRGTFKENGKVCSSLMGLVSLRNKKLRVIPLKSKYVPKKGDVVIGKISDVRFSMWNVDINSPYSGILPAFEVFGREKKELNKVYDIGDVLFLRVVDVDEIKKAKLGLKGRGMGKFKGGIIVDIAPTKVPRLIGKKGSMINMIKDKTNCKIVVGQNGLVWVKGDKDMEQLTKNIIHLIEAEAHTSGLTNKIKNKLYLAIDGELPPEEAEEEQDFVLEKPKLQDFKEELEQEERAKHEAKEIKEKGDKPNIAEVIEELKRKNKSKKDNGLSYGDNSNNSFILNNK

SEQ ID NO: 10570 - protein, 231 aa, Methanobrevibacter gottschalkii
MSEFIRKDGRKYDELRPIKIEAGVLERADGSAYLEFGGNKILVAVYGPRESYIRRLLKPNTGVIRCRYNMAPFSVDDRKRPGPDRRSSEISKITADALRPALMLENYPRSMIDVYIEVIEAEGGTRCAGITAASVALVDAGIPMKDIVVGCAAGKVDDEVVLDLSEYEDKEGQADIPIAIMPRTGEITLLQSDGDLTEEEFQKAIDLAMEGCLKVSELQKEALMKKYSTEQ

SEQ ID NO: 10571 - protein, 261 aa, Methanobrevibacter gottschalkii
MDIVPEITRQSIADLIKNDKREDGRDLTEYRDITIETDVISKAEGSARVKLGGTQVIVGIKPQLGTPFPDTPDLGVLMTNCEMLPMADPCFEPGPPSEDSIELARVVDRGIRESQLIDLDKLCVEEGKHVWMLFVDLHIIDNCGNLFDACELAVMAALKSTKLPVANIVDDEVVISDDETFDLPINNELALCTFVKIADKMVIDPTLDEQRVACARLNVGVTKDGHICSMQKGGEEPLTKDEIFYCVNTAMGKVNELIENL

SEQ ID NO: 10572 - protein, 209 aa, Methanobrevibacter gottschalkii
MSNTIKNDENIKSCIILCGGQSRRMGQDKGSMIIQNKPMIKHILSTLNKHIDEVIIVLNDQVRVDKYAKFINPEEYTYSITFLKDKIKSKGPLSGIMTGLGEIKSDYALILPCDSPYVSEDYIQTIFSQIDSDYQAIVPYHDENNKLKTSEPLHSIYKKDTITEIEKLVNEDVLHIKGLIEKITTKFILIDNKKIEKKEFRNLNRPEDI

SEQ ID NO: 10573 - protein, 253 aa, Methanobrevibacter gottschalkii
MDEHEKWKIKFSLLMVVLIIIIYGSNYLVLGDGEHIISYVWTHLGFIPVDILVVAFLLEGIIERKEKEAMLEKLDMLMSTFFSELGNDLITQLSTANRHKASTASLKSIKNWDDEDYEDKLEELKNSPIEFTANIAPENREKFLEDLRELLVNKREFILNLINNPNLLEKEEFTSLINAILHLDEELEHRKDLALVNDIDFGHLNGDMNRVYNILVHEWVYYLKYLNKHHPYMIALMIRTNPFDEDASVYVTE

SEQ ID NO: 10574 - protein, 187 aa, Methanobrevibacter gottschalkii
MLDDKDFIKSCDVPGPTKEAIRAIILYKSEVTSKDKVVDCGCGTGGITCEFSQRAGEVISIDTDPEAIDVTSKNLKKFGLGDNVTLINDNGSKALKNIKDIDIAIVGGSGRQLENILDIINENLNSKGRIIITAILVDTKVEAINKLKDLGYNPKIMEVNVSNGRVLDRGVLMISENPIAIITAKKR

SEQ ID NO: 10575 - protein, 182 aa, Methanobrevibacter gottschalkii
MIVVGITGASGVIYGIKLLEALKELNIESALVISDLAKVVIESETDYTFEDVIKLSNTYFDFHDLTASINSGSFKTDGLVIVPCTMKTLSSIANGYGANTITRVADVSLKEKRPTIIVPRETPLRSIHLQNMLTLSQEGATILPAMPGFYSNPKTIDDQINFVVGKILDSLKIENNLFKRWE

SEQ ID NO: 10576 - protein, 408 aa, Methanobrevibacter gottschalkii
MSEKKKFIRDSVYGDINLNDFEVKIMDMPQFQRLRRIKQLGLISLIYPGATHTRFEHSIGTMNLGSKLAEELDLKKDEIELIRSSSLLHDIGHGPFSHVSEGVLSVPHEELTKFVVTKTSMRELLEEKFDVNEIVDIVNGKGYLGPIVSGELDVDRMDYLLRDSHNTGVAYGIIDYERIISNLKLENGLILDIKGVQAAEGALVSRYFMYPSVYQHHTTRIVNSMFRRALKKIIDEKIINEKDIYKYDDTDMISIFRHCDNTFANDIMNRLDNRRIMKRVKTIRLNNFKFPEKMYKIKAKTLRKAEEEIAEDYGLDKDYVFINIAEYPRFDEMKTQVNVDGKLYPLTKISNIIGALSKARFNIPDISVYVDNSERSKFDKFKLENYLELPEIDREKFHGIHYDQIKLI

SEQ ID NO: 10577 - protein, 95 aa, Methanobrevibacter gottschalkii
MKGSVKAKLIVFMVIALLAFGISSAFASLIISDSPDSYKLIPIKNDSFEPNYINKVPTILPKVETNNTTNITTNKTNYNMTNLNYTNQWVETYEN

SEQ ID NO: 10578 - protein, 405 aa, Methanobrevibacter gottschalkii
MVMFSAGDTAWVLVCTLLVLLMSIPAVAFFYGGLSKRKNVLNTIFLTFIAFSIISVIWVIFGYQFAFGSDINGLIGSPTNFFLQGIGIDDLSGSIPTLLFVMFQCAFAGLTCAIMSGALVGRMKTKAWVIFTVLWVCLVYVPIAHWVWGGGWLMQMGALDFAGGAVVHINSGISALAVALVLGRRKNTSLIPHNLGYAVLGAALLWFGWMGFNGGSGLAANGLAANAIIVSNVAAATGLIVWTIIDTYLVGKPTVLGAISGAVAGLVGITPAAGFVDVYGALIIGAVAPLVSYFAVYYLKPKLGYDDALDVWGIHGMSGVWGAVATGIFAVPAVNEAAGLIAGNANQVVIQVMSVVATIVYAFTISFILAKVLDKAMDGIRVEESDEIGGLDNNLHKESAYNFNS

SEQ ID NO: 10579 - protein, 112 aa, Methanobrevibacter gottschalkii
MKRIVAIIRPEKFEDVKRELIEVGCEGMTVSEVKGRGSQKGIRESYRGSNFCIDLIPKTRIEIVVNDDRLDLIVDKIIEGAYTGNIGDGKIFIQSVDNVIRIRTNEHGDEAV

SEQ ID NO: 10580 - protein, 203 aa, Methanobrevibacter gottschalkii
MIQMAKKNILALIILILIIIIFGMNLFNNTVNIYLDGENVSVETQTFEDIDSNSLNKDICSYTLNVMNNTTSDVETLKNGVEKLCYQHGLEDAEINIDSSLGHDQIPIIVHVDGTSMLPTLQNGQTVLVNKTHDFEVGDIVVAESKEYGGIIKRVDKIDENKVHLISDNKNISYEYIDGALYQIKGITTWVDISDVNGVVIDY

SEQ ID NO: 10581 - protein, 225 aa, Methanobrevibacter gottschalkii
MYSQTKIAIPIFQNDYKNVIEVANDCIKKGADVLEFRIDALENPNIREIKQTIEEINFPIIATNRIITEGGFFKGTEEERFNILYECCDLVDYVDIELQSNDEYINKIHDTGVTTIISYHDFEKTPKLSEITYIVEKEQELGDIAKVAFMPQNLDDTLTILAVLSHCKDTIAISMGELGSYTRIMASKFDSPITFAAGSDVTAPGQIDIETMKALLNMNLNIMDE

SEQ ID NO: 10582 - protein, 241 aa, Methanobrevibacter gottschalkii
MKITAIGADISKNDVSCSTMLVENIEKSLYKVKKLGARDVALTNVTGDDVVVSAFVEDDLLEIVNEGIVNVLKESAENLGDLSGISQTPEGAGEGISYAESTVRKDRYPDAIVLGFDTYGGEPFVADVANSTIDAAKGMKNLTDVSDYIESKIRKIPGVGYVSPETDDPVVVATVENIESVGVIASAMIGAALGNKNVYLVKRGTTCNVLPGSVIFSATAFMNGNIIDLAVPFENKTRILR

SEQ ID NO: 10583 - protein, 287 aa, Methanobrevibacter gottschalkii
MILLNKDTKCLVQGITGKQGSFHTEQMLNYNTNIVAGITPGKGGRMFLDQIPIFNSIEEAKEETDINASIIFVPAKFAKDAAFEAIRHLDLVVIISEHIPVHDSMQIMAYAKQMGTTIIGPNTPGIISPGIGKLGIMPTHIFKKGNVGLISRSGTLTYEIANELTNAGIGQSTAVGIGGDPVTGDNYVDILKRFDEDKDTDAVVLIGEIGGTAEERAGKFIAEEMTKPVVSYIAGRTAPPGKRMGHAGAIIQGNSGTVESKTRALNEAGVEVAAKPSEIVNLLKKVM

SEQ ID NO: 10584 - protein, 400 aa, Methanobrevibacter gottschalkii
MSNQEIIDKLLNGEMKLYQVDREVSAKEATDIRREFLEQKYSIKLDNISNYTLDMERASARNIENSIGVLQLPMGIAGPLKINGECCSREVFVPLATSEGALVASINRGASTITASGGANVRITSDIMTRAPVIKCEGVGDALKIKQWFIDNFDELKSIAESTTSHGKLIKIDPILIVGSYVYPRFVFSTGDSMGMNMVTIASEKILDKLAQDTSAVHVALSGNVCVDKKPAAINIVEGRGKSVIADILVPKDIVLKKLKTTAEAIVEVNMAKNLIGSAAAGSMGFNAHYANMVAAIFLATGQDPAHVAEGSLGITTAEDRDGDLYFSVNLPDLPVATVGGGTSLEVAHEGLEILGVAGSDKAREFAEIVACTVLAGELSLVGALAAGHLARAHQELGRG

SEQ ID NO: 10585 - protein, 68 aa, Methanobrevibacter gottschalkii
MDDFLDELYPEITLETEDIVMTISLKKDYSQTKDVNVRKKEFIKDLNDFIKEFEETSESLEFMRYFDD

SEQ ID NO: 10586 - protein, 212 aa, Methanobrevibacter gottschalkii
MIFDSFYTFLGQLVVFLAILIIILFIVILVLGVLIARKNEIKFPRFILFVVDSLYFPFKSIANFLKLDEYLIDDISIKVRDELNKEKFRSIPSEKTLIFLPHCLRHKNCPATLQKEGLNCTECGLCSIGVVKKKAEPMGYKMYIVPGSSFVKKIVKENKFKAVLGVACHEDLNQMMMLLSDFCPQGVLLEKTGCFETKVNIKKIFEKLDSKY

SEQ ID NO: 10587 - protein, 150 aa, Methanobrevibacter gottschalkii
MNIDFKNNEILFLEGETGIVGIVKVAHDNKMLFIATHDNQEIVQFLESDDIIAVSNFKKDKRTIRSQAYLSREESSPLIILNKDHPSTKRLETVISIGDEVNLNCNIIPGTHPEQNVLCSCDSLSGLKIIKTPTGIKLNKEFDNFTIEKF

SEQ ID NO: 10588 - protein, 51 aa, Methanobrevibacter gottschalkii
MCSGGGPMADIDIKKLKTKKYFCKDCGNSFKGLGKKVVCPSCQSENVELVE

SEQ ID NO: 10589 - protein, 338 aa, Methanobrevibacter gottschalkii
MYEKIINNIKLNLGENKDLNRKYLASQIENYKDHPYNLEITKEISRMMWDCLSDEEKREFIEISENETPVIDILEEIYPMIEMGKYDNALDKLNGFMKTFQPMFEDDAVNEYHFFTNQLEEEIFNKYIGAKKEMRYIPNNHPLLDLYYVYGFLLLEKHELKEAEFYLKKALKINPVSSRILLELSDIYKTKAPNFNKFYMYTIQALEYAYYPQDLARCYRNLGQFYMEEMNFEMAAALYNYSMKYELNPIVYSKLQYIKSKGTNIELELEECLNTLKDKKIQIDVNPFILKTLEELSDKYDEKQALHQALYFYELQYDLNHEQDILEKINNIKRVMNH

SEQ ID NO: 10590 - protein, 547 aa, Methanobrevibacter gottschalkii
MANQPIFILPEGTERYSKRDALRMNITAAKVLAGIVRTTLGPKGMDKMLVNSLGDVTVTNDGATIMSEMDIAQPAARMLVETAKKQEEIVGDGTTSVVVIAGELLSKAEELLDDGIATSVVVKGFRNATEKAVELLQGIAIDADDKETLKKVAVTAMSGKGSDYAKEHLADLVVEAALRIEEDGKSDIENINIQRVSGDSVEDSFLAEGIVIDKAPLSKAMPKDIKNAKIAIMKYPIELKDINTDAKIDITSPDQFEMFLKNEEQMIRDLVDKVVDSGANVLFCQKGIDDMAEHYLKKAGIMTFKRVKKSDMERIAKATGAKLVTDIEDLSEDKLGSAGHVYLDKLFDHELTFIEECENPKASSIVLRGSTRYVTEQISRAIDDALGVVAATIEEGKVLIGGGACEIDLVKQLRDYGETVNGREQLAILKYAEALEVIPRTLVENAGLDTINLIADLKAAHEESNLIGINVFTGEVVDMKEAGVIEPLRVKIQALQSAGAASEMILRIDDMIAARNALNSTGPDESGNDASGMPPMPGMGGGMPPMM

SEQ ID NO: 10591 - protein, 1312 aa, Methanobrevibacter gottschalkii
MNKQLLLTFLFVLAVILSVSAISASDVNVTDSYTTSVADGASNVSVPIENSDDSSVLSLSSESDVGNVSSKNSESVKSNTLSTNSDTNSLSNRGNDVLEVNNTASPTINASETIASKDITKYYKGSTGYTAKFLDMHGNPLNGSDVKITVNGVTYTKKTNSVGVASLAINLKPGTYKIVSENLITGYKLTNTIKVLSTINANDVTKVYTDGKKFYATFLKSNGKALANAYIKFKINGKTYSKKTNSKGVASLSMTNLKKGTYKMVSYNKDGLTKTNTVKVVSKTSSKLNTNAYTFLKSDSKNIKVTLLNGLGYAPGSGKIIKFTVNGKTYSAKTNSKGVASLKLPYLKAGTYTVKYKFSGNTFYTASSASNKLYILPSKTATFTVKSTTTFGKGANTPFKVALTSGSVPLVKKTITLTVNGKSYDKTTDSNGIVSIPIDLQNGKYTVTYKFNGDSKVNAKTGSSSIIVKERTSTKVTWKSGTSFYQGAQSYKVLLQDSNGKALASKVVKLTVNGKTYSATTSSNGYATFNVNLAPGNYSISLKYPGDNSYAPSNGNVKVSVEKKENTGYGYWVYGEDMSNVDLKSLASKGTSDLFLNFKAIELHGQSKVESWIASANKLGMRVHIWMQIFYEGGKWVNPVKNGKPYEAFFEKKITEAQGYAKIKGVAGIHFDYLRYSGNGESAAHKTPGGAAAISQFVEDATEAIHNIDSNIIVSAALMPETTSILKYYGQDYSVISKYLDVVIPMIYKGNYGKTSAWITTTTKWFVDNSNGAQVWAGLQGYKSDSNVTKLSASTIKTDAQAALDGKAPGVIIFRWGVTNFVDFSSLSDKSTSPSTTGSVTIADIIAAANNLKNVINSKNTIPATVSVGGSSYSTAQFLYMMTEAVKKINGGKTSSQILPISVGVPTNPSGSFKSGNIASSEYVNMAISINSFIMENGRAPNFASSSSLGTIDYDSLVEMFADILTDYKDNNKLPTSVKVDNGTKSEVITAKTISIKDIVTGATNLKKYYNDYKKLPSTVTAGKITFKLSEFVYLMSKAINQIGKSNTKAITIITGIGNPTNPSGDNINSKYLSKSEYLKVALNVTNYINKNKVAPNYVSSSLGKIIYSEYVDAFSRILAFYGNENRLPNTVTISYSSGSGSNSGTGATGTGLNEALKNGTELSQYLKATKNCQVDNSKIKDIVNKVTKGLTSVKDKATAIYNYVRDNLDYSFYYNTKYGAVGALNAKKGNCVDHSHLLVAMFRTADIHARYVHGKCTFSSGSTYGHVWVQVLVDKKWTVADATSSRNSLGKVANWNTNKFSFNNYYSELGF

SEQ ID NO: 10592 - protein, 237 aa, Methanobrevibacter gottschalkii
MANGKISENIEEYLEVLYCNGSNGEQVSTTKLSDELGIAPGSVTQMLKKLEKLGYIDYTPYKGATLTHEGMKIARKITRKHRILEKFLLDVLKVKEENIHEQACEMEHALSDEAERALCNMLQHPDVSPDDNVIPACNFNFESCSQCFSQKDFDQIINREFNLLSISELTSDTEGTISFIRGNTDLLDSIADLNIKVGCQLNYAINDNKDEDSYLVFIDDEEFNIPKEMANNIFIRI

SEQ ID NO: 10593 - protein, 171 aa, Methanobrevibacter gottschalkii
MRGSLSNDIVSIKIEEGSKKPIALHEKSLFGKIEADSLNLSLIEACYLLEKGRLNIYEDDFECSVGYIIDLLKEQDLFGKYVVYRDLKDRGFVIKTGFKYGSEFRLYNRGRGPGQGHSDYLVKIIFENYEINALDFASYVRVSHGVNKKLLLAIVDDDFDITYYNIEWTRP

SEQ ID NO: 10594 - protein, 371 aa, Methanobrevibacter gottschalkii
MSVGDNMGNLIDPWASFSLDYDKLVNQFGIGKFSDIINEIKNPQRLMKRGVIFGHREFSEINNLINQNKDFAVVTGMMPSGQMHIGHKMVVDQLKWYQEKGAMLSLPIADLESYAARGMSFEKGREIAVNEYLTNWIALGLDLEKDNVNVYLQSQNKALQDLAFMASSKTNFNQLKSIYGFTPSTNIAHIQAPLVQVADILLPQIEEFGGPKKVVVPVGIDQDPHIRLTRDIAQKLHEDLGLLTPASTYHRFLTGLTGDKMSSSKPSTAIYLNDDTKEAVKKVRSAKTGGRESLKEQQELGGEVDKCVIYEMLLYHFIDDDGELEKIRHECLSGTLRCGDCKVRTAELVEKFMDELKEKQVEAREIAKTLL

SEQ ID NO: 10595 - protein, 398 aa, Methanobrevibacter gottschalkii
MIRCVSCGEEYGDDEVIYTCEKCGSVLELVNEIDVSKDIFDGRKDTLWKFKECIPVDENKIVSLEEGGTPFCKCDKLGKELGVNLYVKVEGSNPTGSFKDRGMTVGMTKAMELGVDTVGCASTGNTSASLSAYAARAGLRCIVFLPSGKVALGKLAQAMFHGAEVMSIDGNFDEALEAMTALALEKHLYLLNSINPYRLEGQKTIGYEIVRDLGWQAPDRIILPVGNAGNISAIWKGVSEFYNAGFIKDLPMMTGIQAEGACPVTNAFKKGDRKVVPVENPETIATAIRIGAPVSDIKALNAIYDSNGYSETVTDEEILDAQKLLARTEGIGVEPASAASIAGLKKLVDEGVVDKGETITCVVTGHLLKDPNTAIEACTKPTQVDADIDTLRKILMNK

SEQ ID NO: 10596 - protein, 66 aa, Methanobrevibacter gottschalkii
MAELPFAPVGRILKNAGAQRVSDDAKVALAEAIEDYGNDIAAKAIGFARHAGRKTVKAEDVKLAIK

SEQ ID NO: 10597 - protein, 122 aa, Methanobrevibacter gottschalkii
MANIYVKFDTPEELAKQAEEALETAFTTGKVAKGTNEVTKFIERGDAALVVIAEDVDPAEIVAHIPVLADEKEIPYVYLPTKEQVGGAAGLTVGTASACIVDAGDAEAAVAEIVEKVAELKD

SEQ ID NO: 10598 - protein, 68 aa, Methanobrevibacter gottschalkii
MEEGTPAEVIKVLKRTGMTGEVMQIKCRILDGRDKGRILTRNIMGPVREGDILMLLDTIREAKEIRTP

SEQ ID NO: 10599 - protein, 53 aa, Methanobrevibacter gottschalkii
MRTCSFCGKEIEEGTGKMYVKRDGSIYFFCSSKCEKNMIKLGRVPRKVKWVKE

SEQ ID NO: 10600 - protein, 150 aa, Methanobrevibacter gottschalkii
MIQKSFVMMKPDAVQRRLMGKVLSRFEQKGLKIVACKLIQIDEELAKTHYGEHADKPFFPGLVEYITSSPSLAMVIEGDEAITTIRKLVGATNPLEADLGTIRGDFGMDTGRNIIHASDAPESAEREIALFFNEDEICDYQIVDNDLIYE

SEQ ID NO: 10601 - protein, 596 aa, Methanobrevibacter gottschalkii
MKIRSPIVSVLGHVDHGKTTLLDYIRGSTIADKEAGGITQHIGATEIPNDTIEEICGNFISRLTIKDLIPGLFFIDTPGHAAFTSLRKRGGALADLAILIVDINDGFKPQTYEALNILKMYKTPFIVVANKIDRIFGWETHEGASFSESFNQQAQSVKQELDLKLYELVGTLHKEGFQSERFDRVSNFASQISIIPISARSGEGIIEVLAMLLGLAQEYLTEQLEINEDAPAKGTILEIKEEVGLGLTVDSIIYDGVLRTNDEIALINSSNEVVTTKIRSILRPLPLEEMRDSKKKFRKLDEVVAAAGIKIAAPNLDDVVSGSPLRVLSEEEDVEEQLLKEIEDITINTEDEGLLVKADTLGSLEAVVKLLRDLNIPIREADIGDVSRRDIINSKIALNENEAHGAIIAFNVDVHPNSLDDLSNSDVKLFKGDVIYQIIEDYQEWTDEIERAKKKAFYDAIVKPAKFVALPKLVFRQSKPAIIGIESLSGTVKQGQVLINKNGEYVGVIASMEDKGETLPSIPRGQRVAMAIKDAIVGKHFDEGDELYIDVSEKHYKFIEREFKDKLTEDEFETLYELVEIKRKKDPDWGKFGLFE

SEQ ID NO: 10602 - protein, 127 aa, Methanobrevibacter gottschalkii
MAFKVVVSQGAETHQIEVDETKAFNGLTIGEEFDGGLVGLDGYTLKVTGGSDKNGFTMKKDVTGTRRIKSLLTGGIGYHPKADGVKRRKTVRGNTIAEDIVQINTVVTQAGNKSIADIIGAGEEEEE

SEQ ID NO: 10603 - protein, 404 aa, Methanobrevibacter gottschalkii
MNVQSDVNIGLVGHVDHGKTTLTKALSGIWTDTHSEETKRGISIRLGYADIEFRKCPECGEPECYTTDDKCPICGSETELIRKVSFVDAPGHETLMATMLSGAAIMDGAVLVIAANETCPQPQTKEHLMALDVIGVKDVIVVQNKIDIVSKERAIESYNEIKEFVKGTCAEDALIIPVSAQQGANVDILIEAMLKQIQPPERNVDDTALMHVARSFDINKPGSGADKIKGGVIGGTLIQGKFKLGDTIEIRPGPTNDGKRMTLTSEIIGLEANGEQVEEIGPGGLVGIATKLDPSLTKSDSLSGTVAGEEGTLPDVLDSFKMDANLLDRVVGTKEERDVAPIKLKEPLMINCGTTTTIGVVTSTKKNDVEVTLKLPVCASPGDRVALSRRVGARWRLIGYGIIK

SEQ ID NO: 10604 - protein, 130 aa, Methanobrevibacter gottschalkii
MNSKEVVIDTNFFMVPFQFNVDIITELEKLLPSYNLTTPSFVINELKGLKRNKNAKTRLNANLALKLANSSKVEIKDISLLENETVDDALLRVSEVLATNDIELKNRAKDKGITVAYLRQKKYIAVDGKI

SEQ ID NO: 10605 - protein, 194 aa, Methanobrevibacter gottschalkii
MYYRTKIKDTVRIPPYKFESPINEVAIETLNEQYAGRLDKKLGLLICVNDILEIGEGKLIIGDGATYHNVVFEAIFFKPEQHEIFDGEVIDIVDYGAFVRIGSMDGLIHVSQVTDDYITYDAKRGALLAKESNKVLEEGDLVRARAVSVSIKDESNNNIENSRNSKIPLTMRQTNLGRFEWIEEAKQKSKKVKE

SEQ ID NO: 10606 - protein, 58 aa, Methanobrevibacter gottschalkii
MKACTVCKMISNKDHCPNCGNPTSDNWSGLLIITDPEESNVARELNITVAGEYCLRVR

SEQ ID NO: 10607 - protein, 168 aa, Methanobrevibacter gottschalkii
MLRLDTENKDIMSELKRPLGKLYPNFEDAIDEIKSSEFLISVGDATFGNLTKYELYPNIGIIDNVIQRKNHTHEIIRAEHILKAENPAGTITDDLWETIGHALELSNSGECYVIEVAGEEDLAVLPCIIMANPETTILYGQPNEGLVLLKVSDLKNKAKKLIDGFIKE

SEQ ID NO: 10608 - protein, 104 aa, Methanobrevibacter gottschalkii
MEIEFIEEKENKLFNRKEIKFYVDYDGEATPKILDIKSKLVALLNTKKDLIVVDNVQPHYGEPKALGYAKVYATVDDLKYIETNHVLAKNEEPEEAAEEAEDEE

SEQ ID NO: 10609 - protein, 50 aa, Methanobrevibacter gottschalkii
MVKKSDLYKVDGDKIERKNPICPRCGEGVFMADHGDRFACGKCGYTEMKK

SEQ ID NO: 10610 - protein, 473 aa, Methanobrevibacter gottschalkii
MDNIRNGRFKTGMTDEAAIYTSSLEADKLLFEADIKTNFAHTSMLKHEGIVDEEIADKILCALDSLKEEGYDALVFDPSVEDVHMAIENYVTSKIGPDAGFMHTAKSRNDQVACDVRLVLREEIINIQVGILEFMEGLVEMAGEHLEDVFIGFTHLQHAQPITIAHHLMAHVQALKRDYERLNDTYKRVNLNPLGSAAMATTSFPINRQLTTDLLGFDAYLENSMDGVSTRDFIAESVFDLVSLCTTLSKICEELVLWSTYEFGVIEMADEYSSTSSIMPQKKNPDVAELARGKCAIVNGELVTILTILKAIAYTYNRDLQEITPHLWNSLKVTKDTLSIVTKMLLSVEFKTERCAELAGKNFATATDLADIMVREKQIPFRTAHKIVGRIVNEATTKNMVEEDITSKFIDDISAELGFDKLNLADDLIQRALNPVENVRIRSVPGGPAPEMVEIARENIKEFLNAEFEKHGI

SEQ ID NO: 10611 - protein, 62 aa, Methanobrevibacter gottschalkii
MMHKICPRCGSRKVKWIIPQNWSQWVCYDCDYTGPVIEGNDDLAEEIHENYLKSKNKKNKND

SEQ ID NO: 10612 - protein, 338 aa, Methanobrevibacter gottschalkii
MYTEEFILNEVNSIREDIGHDKVNIYIEEIYFNENTNELWIITEDRPDKSAIIGKGGWVVGKLREKLGLESIHVESYGDFLNKKYKLDLSKKTILNLNSDSVGLKNLEKVIDDKISSIYSFNFENYLSENEFKKSYKHEAVVALSGGVDSSFSLILAKKLGFNPIAVTVDPGTIILPKQFKRNIKKICDELDISHEYLRTDYSEVINESFTGKVHPCGRCSKNTEELVREYAKSKEIPIIIFGDMLATGSQCINSQYDSLYRLNLPASLSTSKQEIKSLIEKYNLSTFKGFGCPLLYEVHRKFPHMKKFSIQRILRETRSGALEPGEALDLIWSFYKI

SEQ ID NO: 10613 - protein, 682 aa, Methanobrevibacter gottschalkii
MGRGFKLKIDKFLLLILIFFILLSCVSLVSASNTVDTNLTHDASSDANIGINDIESYSSGVFSDDVKSTGNVIVNQRNYKMYFDDSNVLKKEYGGKIIAFSGKFTDKGVITIDSENTKITGRNTLFNNTVFNIKSNGVMLTNLNFVLNKEFSDNEGACVLINGDNVTVYNVDIDYNVPKNVTGFGIYSNGLDESLSDVKLVNNTVRLHGNALNDGYNYGVVLTNTRDAIVYGNIIDCQLPLRAVNWMAEIYGGISMDAVSGLAAGSCNGLRLSNNYIRCVVNGVAQGEPTLDAVLIYACHNSTIENNTIIENDYVTKKGDVNYLYGLDLYLSNDVVIYGNDIHIRTSGGKEAHGTAYPIQVTGQAENILIAFNNLSSYSNGPNIGIYSQNYYGVTHLDIISNFINVTGHASKHSWALVAGIEVQDSDDRIMNNTIIVDTVNKFEKGYNVYGISYSQRTDGDHNYNIQYNNVSTNSDHAVALKGSGSSTVSNSIVANNILKGRKYGGNRAAYITGGTGNVIINNTDGSRPVHKMTDDEYSDNLKFYLSSPFKGNGLGLGWLDGDGNSIIGNGDRNGNSLNNGNSGLVNNKVYGNNLNYSESQARNGVLNSTYYTYGSSGTDIASASSSSGSGAGSSNSESSDVKSYEVTKKINDNLIHIPIVIMAVIALILLIIGYKRKEHKE

SEQ ID NO: 10614 - protein, 1099 aa, Methanobrevibacter gottschalkii
MKLNKIIVLSLFLVLICFIGAASATEDVNDTAIADSEIDEVSAVDIEQSVDDNEITEIQSSDESNKVLARGTPTTAKDWNTLRTKCEKTTDQYITLTGTSYPIGTYITFKNSATIVGSDVSYITGGSTSNTPFVNNNSALTLHFINVKFLNVNAKNLLELDGTVYLDNCTFDNVQTATGHNSVIYNTNNLMYLTGCNITNCHTGYGAVSNYNSGSTTSPVMYVDDCRFINNSASVEPGAINNCGILYVNNSEFDGNHANWWAGAIHTHTNAQTEIENTNFRRNTAGWNGGALFTYSKLKIKNCTFEDNNCTTNNGGGAIGAYNYGSGYNITIDSSRFNYNTNLCYAYTNISTTSVGRGGAISVLNGGYLTVYNSNFTGNYAKIGQAIAAATYNYENGTGGNPHIKICNNKFTDHTATGIDTVVITGNDYIFNNNVFINSYQNTIYTGTGNTYNSAALPGNLNSKLNLKTKLRATNTEILSDYQDHDVVYVNVSSDKDAEDDNVHGQSWDDAYGGLECFVMAINYLHNNGIIYIADGRYNEDYGYEYSIAHGNFTMIGQGPKTNIEKIITTVYGGSDQNSTHNFINLSFTGKDFGINANFINCTFLGSISISKGLTYHDPNHVVEYGYAQTYFMNFNNCVFKDVNTTNALVTLYKYGAVNFTNCIFENITADSIVYRNDINYFEEDGISFKNCTFTNCKYNGIADSLANFDDAVVIEDCTYDSEVALGTTEVNGHYYINATKLKVTAVGTSISIKSNENNVIVNLTDVNGNPVANAGIIYSIAGTNASATTGADGTFTLSNLKGIVNITVYYSGNESYLASNKSDNFIFKYNTAVSSAVNGDDILIILKDDENNPIANANVIYTVNGIDYNATTDENGTVTVSNLKGKFAFNVLYKGDTLHTASNASNTFIFKYGTKITAKKVTATYNVAKNLVITLKDENGIAIAGKKVTVKVGSIRKTLTTNAKGQATLKVSNLLPKTYSATVTYAGDDTHIKSSVKVKVVVKKATLKVSAKAKKFKKSLKTKKYSIVLKNNVGKVLKKTKVTLKIKGKTFKAYTNSKGIATFKITKLTKKGKYNAYIKFAGSKYYNSLNKKVKITLK

SEQ ID NO: 10615 - protein, 119 aa, Methanobrevibacter gottschalkii
MRKIKSLINLRIVNCTNNELKSELKNILTDDKLDENKIYNKLKEENTLETLKNEFNEFISNSNSSEKQFLVKIKNKANKLNPEKHTNIENIQKEIIIKLLNKDNIINNLQKKKICTNIG

SEQ ID NO: 10616 - protein, 1864 aa, Methanobrevibacter gottschalkii
MKNSDDVLNIDVLNQNSTVNYPRSHKTIEITQDNYENYFNIRTGKIIDASCISKGDTLKIGNISNRAFVIDRQLILMPISSNDKISNGFIHLIKGSDGSTVTNLTINNTKDRLNILGGNVGQLHGIWLSNSNNNLISYNTIRIANAAGVYAMPMGWSSNNRIIYNNMKTYITCNMVMGQCHYNLISHNSLELLSYSDTSVTNLIYFNPFGHADYSGSGLCKYNMISFNDFKGFSNGPMSILLQSVYENHDGTVIANNTFSKGSYAIHLFGNNISVYGNVVLNSGIGISVFGRNFSVHNNAVIGDSQGYGIMAEANGGSLCNVYNNNITFIDVYNAIFIGNHVKAYNNYINIKEYGVSIFIKGNCSNIHDNRINNKHDAGISVLGNNNTINNNIINTKNIGITLPARSTNCRYYNNTFTNNKINSESYGIYIDGLVYNCIILDNIIETNSTMGIFKDITDELSNIEENNMVNGVILDSTYIIVNNTNYHKYFDKYGHLTFKFEKNKTKIIFLTFLTNKNLIFQEKINVISNKMNNLLINVTITFETNASGSLIRDFNFINHDKEAIILNGVNDVTVTRNNITNLFRNGSLSNSAVLIQDVCENLIISYNNIYVNSRTHCYTYAINAPSINPATHKMNNKLSKRVNILDNTIIMISSGITEAIYTDTLSESNFISNKINIISKNYGYGIAVSNMIGRLSDINVSNNEIVIHSEQMAYLIELLQVDNSTIENNKLYGKSNGVYAIGIYWSDNISVNNNAISVFGGNLSKILEISDVLGIGNSAIAILRNSSKIIISENIIYANLSKTIFDNTTDGIINASFNSFIIDNENYNCYFNEVGELYSNVVIKNSTLLIHNLTKNQLLIINDLVKISSYDLNSPSSISIIFKNNASNSIISNASFINSSIDLINVSNINIINNTFNSSNSCILNINGGEKNLFVNNELFINSTDISVINLNKTLLNIIKNNNIKFNTSNSKIITINNSNFTLISNNVIIGISDSLIFICSKGSSYDNIYKNILNANASSICGYLASNAKWSSISYNNILINKSTNQSAIYYCNNSSNNTINENYIISYSLNANDYAVSVISNESLSNLIIKNYLISSNGFKRANFAVYAPFDLVKDNSPFDIYVSCNGSDVVGDGSIDNPYATIKKAIENSLNLYVIHVFDGNYTESNIIIDKNLTLVAVNLGKVFIDVQINQLFDILEDNTLSISGFLIGNAHNVDGGSVFINNGKLFINNVVIFNSSSYFDNSHPIFDQNITYHEDNLIDKAHTVDCSNTGKGGAILNNGELIINSSIFFNNFGHRGGVIADYGKTIINSSIFYNNRGIHGGCIYSDSKNNLFVINSIFNNNTAVTSIDFCKIMLHSIGWSIGENYIYNYKSECDSPIGAGGVIYTKNTSVLIKNSSFIYNSARIGGVIATQCDIFTQLSNFISDVNLYIDNCYFNSNKANDTRFKDDPLYLKNYDYFNDYNGGVVYGTYNKLYINASNFYYNQVINNGGVLYAKANDGKIIDSIFNNNRAGSNGGALDISKNFLIMRSIISNNSARYGGAIEYDSYTYYGHIQDNFNIYNSTISNNKALNAGGAFNIGSGNVSVHDSNIVNNFAPSGTTINSHGIKYAIDMRYNYWGVLPNGHIGPDDSVWNVNHNLFKPWYKQWVEWKPKVIESNNSGFNSNSSNHNPYINPNSNSGGNNHNNPISTGSSSSTTTSIGGANGNNHGYGNGKYFGSGDGNNLGPSSGNGGFYLAIPGYNKYNGQNVNSNTSSNSHKSQNRGNVDSDSLSKSNSSKYNPDLVSAGFTVNAASSPSSSQRGIERASKESGSLSDSASYEITKKIKEVFYDENHITTFILFIIIILFLIILGYKYGVGKFDE

SEQ ID NO: 10617 - protein, 2193 aa, Methanobrevibacter gottschalkii
MSYTKFILILSIIFLLFASIAFVSAADTNTSIVEEPMDVKHNLCDINNSLENQEIYVSPLGDDDANGSFQNPVSSIHHAVAMAKNNSKVILMEGEYKGANNTFILINKNLTIESFSNNVVINGENKHAFFKITPSSSLILNNIKFINGYTDSYSQLGIINNLGTLVINNSSFNNMNSIMGTFFNEGTLKIENTKVTNAVSLTMAQILTNIGNTTILNSQLIENNEYSSIDVVVYNYNRISIVNSQVNNLFSNKKYSEDSYNLASILINNSKLDNIDLEDAFVCIHNSQITFKSIFNGCNVSVDESTFLYNKSLFSIINVMNSNFTAIHSVFNSPISTKRSHVNITYSAILRSISGNAYKCYLYAPYNWWGINSGPSYQYFTDVNVSYWAISTFEYESDYIPINPNSTFTTTLNKWSDGNSTFEFKTEEYLPFRHLKFESQNGKFLYSSANIEKVFSNYLIGNNLDCQVHVIIDFQRLTLRIGEGLTNYNYFVSTEGHDGLGNGTFEHPFKTINYAVSKVGNGNTICLLEGIYKGNWNSNVTITKNITIVGLGNVNLLRSNDYSIFNIKEWGSLSLKNINFSVDIIDYAHPLIILNGGNLSIINCSFSNITSTNVIHTSNGIEHNGIVNISDSYFADISGSILIGSAKVSVSNSLFEKIKCYRIIQGYEYYNVLFAISSSIEIYSSCFQNNLMGIVNLHPFFYSSSKLRYSQYSNAYSRYAYIKNTKFENNVFFDKNSYYSSNGIGLDIYNENEHFYGIIDNCSFINNKGQLAIATSVNSSIFMNNFESRYGYSMVYADLINNSVFINNKNLYEDYNNVFIGNGIASAGCILESIFMYNEAAFGGAIADTKEAHYCVFVNNTSKYGGNDIYSYSGDVDYSSNWWGDNQKPNSDKVFIFLGTLTLNNWVIMTFESVSNSIIKASLNALNNGEGNICKINHNMPSRMVYFKINHGSLSPENTLLINNSAYTNMTYNLNLDFKVYARIDNQLLELDIRNTKTLLIMEDVIFKGKSNNFAVDLININGYKIFNQTLVVEIIDENNTQNIFTIQTDDNGHAEFNVDYPVGIYQVNINYLGNGYFDKCNSTSIMKIIKSNTYLISYNQTYYGKNNLFKSVLFGEGNKKLSNMTIKFTIIDSKGNLREIYSLTNQDATSEIIINLDVGEYTIRSEFLGDLWYSYSSSISHILVNPVSSTLIVSNVTLYGVGDVYNITLKDIHGSLIRGENIIVTITQGASCDKFTLKTDNNGVAKLTINYLPGVYNVKAQFLGDSIYAPTSGEGVIKVEKIFTIISGFHHCILPLNGIYTVVLSDMYGRRVNNESVTLSLYKGNLIKKYTINTDANGEADFVINLEEGTYLTTFEYGGNKWYCDATNAATIVISKKVNLSNININSTDLVQYYGENKYFIIKFNDPNAYSQYGKKIGVTISSGSWSQSYEVFTDIFGLARLKINLNPGEYNITYKYSNSHYNIFGTSSNTIHVYKMPAVLIANNIVMKSNEQQLYEINLRDINNNPIKNMLVNIDIDGVKYNSTTNDEGIAKILLSLGVGKHIISYNFINPNYLSSNSSSVILVVDSDKIPSNLYSQDINAFDNQILNFTIRLSDMLNNSISSSEVILELFTFYGESIINITGITDSNGRISFDLNLDYGKYIANLHYNGNALYLASYSTNTINIESADNRTKTILFNVETKLTNSKYYVILSDINGTLLVNKEIKFIIGNKTITSITDEKGRAYLELNLNPNYYIIKAIFNGDKDYKSVSSLKKIFISGELTHLYAIPLVKYYRNGTQFHARLVNSKGVPLINKILSILLEGNYYNCTTDENGWITLNIDLKPGFYDVECYYYSNNTDENSFDKTNITVLSTVLGQSEVKYYGDYPYLTIKFLDGAGNLIKNTSFVIDIDGKKYSAQTNDEGIFNFNLNLNSGSHLISVNNPYDGLFVTYKLDILTTICSNNLVKVFNNGVSYTAQLLDSFGNPLKNKNVKIIINGVLYYKKTDVKGILELNMDFNPKIYLVTVFNPVTKEYIENTVKILPTLINNKNINMYFSNCAFYKVRAIGSDGKIVESGVIVKIKVNGKSYKIKTNKDGYALFKINLKPGKYIITAEYNSYIVSNKINVKSLLTAKNIFHKKAKKIKFSSKLVDIKGKALKGKKITFKFKGKVYKVKTNKNGIATLTIKNLKVGKYTIMSIWNKFRIKNTIKIKK

SEQ ID NO: 10618 - protein, 1911 aa, Methanobrevibacter gottschalkii
MSKILKINKIILVGIVLLTILSLNAVSAYDNSNNTEEYLSSENYEEILSADSFNDNNILASASYNKTIYVNYTGDDSGSGSQNSPYATLNKAISNVNDSDNAVVYLSAGRFSGENNTDLSINLAHRNYNSSLTIIGAGNGQTILDGNDESAIFTSISADSIVTLINITFTHGKSEIGSVMTTSGNLTIDNCIFDNNYATSSAAIYAENTEDIKITNSVFKNNYGHEGCADFYCEGSESTIIDIINSTFINSTTPYLYSLPSFLIQYSNANIIGNKFENITGVYHSGTFELKYGYGKRKVINNTFINCNYTGNNDGGIIYISNTYLKNNQFINCTSKKALIYSLTEFNAYLKFKNATINGTEFKLYCEVTDDLNNSVSTYGEVHFFINDEKIKSSRSNNGTASISVIKLLDNGDYTLSGTYYYYENPFEVNVKNATLHVDFNHDPLELWVSNDGNDTTGNGSENNPFKTLKHALNYGFENTIDLTIHMKDGVYTGSDNKDLSYSNVGKLTIFGESYRNTIIDAENTKKIFNFGEYLNVTLANLTLRNTSGNVISAYILKIYDSVIEHADSLNGEYSDTSKIIFNNLTYTNSGGIYIYNAEIYNSKFKNCNNTKNNCLLRIGSLGNNIIHIENTTIINNTVNGRHGSSIVSISGNSVLINNDYINNTVISENSKYIFQSYSNKLISVNETFIGNNVSSYIAYYDINGNNVEIIIENITFKNNYVKTDGSGLAIKTGRIKGAKFINNTALNNGGAIIILPHYTGSQVPKCILENVFFENNSANNGKDIFIEKANIGYENGQLDNITVTFNSLITHNLQDIVIANISHVSGAVIGGGMIEFDLNGSYMGVAEVINGVAKLNYLGFTKNGNYTLSGSYNYESNTTIYNSAVVNVILNPLKENITSYVSDSRGDDENGNGSYENPYKTIENALNEGYKQSKVIFIKVLEGNYTGKFNNNITIYDSLNITIIGEGIDKTIITGNNTKNNWFITVLHAGNGFLKLINMTISEINYNYKNMNSQKSAVVIEKGANVFIDSVKFTKNRGYNGGAINNQGTLNIINSIFYNNGDSSYGGSIYNKGITIIDNSSFIANHAKYCSDMFNEGILNIYNSNIQDSMRTNGWTGNTLVIGGLGNISIINSKIFRTGKMPLELIDPDDTYADNPAFTISIGTIGSITLINTTIDGHDAKYTGPNFYITNNAAISWSVSTNIKIHNSSFLNLNNILNNQMGNLIIKSSFIKNVSNLIMSTSNYNLTVINSYFADGTISTEKYDISNIYLNNNWWGSNSKPTYKVDNVDTTPETWLILTLNQSNKESLLKDIILSFKVTDGENITDYTGYLYPRPFTMSAINATLEYANGNIINHLINQINMAKNATSYYIEAKIDNQTVNLTSNITHNVTIIANDIEFDYGTKTITVNVLFDNLSADDEIITLKVNNKEYSTKINNGIAIFNIDTLVRGTYTLNYSINATELHDNVINSSTLIVNGIDPNINASSKAVLVGNNVTVTITIPSDLTGTINVILNNKTYVAEIHDNKAIAIIPNLAQGNYLANVIYSGDEKYLAKNTTLNIKVLEINISAPNVEKYYKGSEKLRVIVIDSEGNAIVGQSVQIKLNNVNYTEITNQEGIVSVNLDLNVGKYSATILVNDKKINTEITIKSTIQGFNMIRGYNSGLDYQATLLNDDGTPLDNTLVKLKIGNSIYEVRSNANGVVKLNKKLAIGTYTVLITNPSNFETQTATLKIVSRINNNKNIIGDYLSGFSYKVRIIGDNGKSVGAREIVKFKINKKTYNIKTDKNGYASLKITLTPKTYQITATYKGQSVKNKITVKQILKTAKKINIRKSAKKLTLKATLKKSNKKPLKNKKITFKFKGKTYTTKTNNKGIAKIIIKKNVIKKLKAGKKYTVKVTYVKDIITGSVKVKR

SEQ ID NO: 10619 - protein, 383 aa, Methanobrevibacter gottschalkii
MKYRKLGNTGVEVSEIAFGAEFLVERPYRDTEVLIKACEEHGINFVDCWMSEPDVRSHLGKAIKPNREKWVIQGHIGATWQNNQYVRTREMDKVIPAFEDFMERFQIDTLDFGMIHYVDQIDDYNEIINGQFIEYVRKLKEEGTIAHIGLSTHNPDIGLLAAQNPEIELLMFSINPAFDMFGPMEDIEEYRKEDAYGDEKLSSINPQRAELYESCEKSGTALTVMKGFAGGNLLSAETSPFGVVLTPVQCIHYALEQKGVSSIFVGVKTVDELLESLKYCEATENEKDYAEILRTAPKHSFEGQCTYCGHCTPCTSEIDISMVIKLFDLAKNHDEVPASIREHYNNLKYDATDCSACGDCEERCPFDVAIVDVMENIQCLFSQ

SEQ ID NO: 10620 - protein, 483 aa, Methanobrevibacter gottschalkii
MYEKEEIISDYIKEELSDVPNILDNELTLDGRSFEHRKEFEFIKHHIDEFLEKTTNNRYFALPGLRGVGKTTLLYQTYEYLFKSKNINPNQILFISCENLNDIVDFKIIDVVKQFLETYHNTTLRRLDKKIFLLIDESQHDKKWALSGKRIYDKTKNIFMIFTGSSALNLEYDADSARRLLKENITPLNYNQHLKLKYNYNAANVSASLKKLIFEGDITDAVSCEQQINQDLININGYSTTDWNEFLKYGGFPTSLFENNPHIICKNITGMINKVISHDMGTISSITSTSQTHANRLLRFLALQKPGDISQEKMGTYLGTSKGNVRNILDILEKTQLIFHCEPHIASPKRSIKSWEYFFATSSIKHILTSSIGNLNSNKNAYLGVLLENLVASTLFYLSNEEGNYFTLYYDPEDRVNVDFVIQGEFQKAIPIEVSMGKKKKRQIATAIERYNADYGIIISNTTKTIAKKDNIIYLPPKTFSFL

SEQ ID NO: 10621 - protein, 281 aa, Methanobrevibacter gottschalkii
MQFLILNNGIKMPILGFGTYQIPPEETKQAVLDAIDVGYRLIDTAQFYKNEKEVGEAIKECGVDREELFITTKVWINNYGYENCLDSIKESLEKLGLDYIDLVLIHQPFSDYYGAYSALEDLYEAGIIKAIGVSNFYPDRLTDICLFNRRIIPQINQVEVNPFNGQYAAQANMEKNGVQMQAWAPFGQGRHGMFENETLKKIGEKNGGRTPAQVILRWLVERSIVVLAKSTHKERMAENIDIFDFALDEEDMMEIMNLDNGETLFFNHQNPEVVERFEDIS

SEQ ID NO: 10622 - protein, 428 aa, Methanobrevibacter gottschalkii
MAYEIKNKKNISTIGVHAGQEEVDETGSRVTPIYQTTSYVFDSPEQAANRFALKEGGNIYSRLTNPTTEAFERRMAAVEGGTSAYATATGMSAIFYAIINITSVGDNIVSADNLYGGTYELFENTLEDLGRSVTFVDSQSPELFEEAIDDKTKAIYVESIGNPKLDIPDFDRLAEIAHSHGIPLIADNTVGIGSVRPFDHGTDIIASSATKYIGGHGTTLGGIIIEKGDFDWMSGKFPSLSEPDATYNGLVFGEAFKDSAFTTRIRTVVGRDTGAVPSPFGSFLLLQGLETLGLRIERHASNAMAVAEHLEAHPKVAWVTYSGLESSPNHKIAKKYAEKGYGGIVSFGLKAGYDGALKFIENVELISFLANIGDAKSLVTHPASTTHSQLSEEQQLSTGVTPDLIRFSVGIEDLEDILADVDQALDKI

SEQ ID NO: 10623 - protein, 1703 aa, Methanobrevibacter gottschalkii
MKFFRKKPRIFLILLIVMICFCLFSQLAFAENINESEVVGNAEIENNLSSTNDNFEVSKDIGYNVSKKISTDNSNENLRNSQHMTLFIISDNPGTNILDKAILELSNENKINGVNLIIRNGNQVKSMNENELSYLLSDCDAFIGEWISSDVDSVLTSVLVKNPDLSNKKLFLVLEPPSGNLNSGSSSLNLIRNNTLNYNKIFTNYSNEELINYFKNTKRGNSYSNINNYLTNGNGKNFDSIFNRLVLYKDLNDKNNLKNQILFILNYLGVDVSYEQPTFTGVKNYGIYRDRWYSLDEYISTFFKATNNRTVGILESKMYIESQQLNTCYSIINSLESRNYNVIPVFADGGSAEQLKVMVESWTSAGDDISGFLSNSSNFDVYIDAIVSMVAYGVGGENFTKATSFFEEAGVQVFRAVHSDHVSNEQWELGSTGLTTEKSDKWWHITIAEAQGIIDATFIGGNSSYISNLTGAQITTYIPHEGNIGLLADRIDSWVDLKYTLNEDKLISIIYYNYPPGKQNIGSSYLDTIKSIYNILYTLKAAGYTVGSLPVDVSELEYLMLTCGINVATWAPGELEKIANRSCITLLPVSEYNSWFNSLDEIVRIQVSNGTVAYIGELTKRAVELDYTKTIGSTIDDWYNQVVSLLPDEKSVEAKEVLSNIVRALKDYANTHSQDYYRLYLKYFDEFKELNIQGLNGWGETPGNVMVVNKNGTDYFVIPGLTFGNIFVAPEPQRGWESDIKNLYHCTAVAPTHQYLAAYYYMQTRNPNAMIFTGRHATHEWLPGKEILLSATDYGSVVVGDVPQLYFYISDGLGEAIQAKRRGFAVIISHLTSPMSYTHLYGNLTFLANLINDYQKAGSSSEKNKIGEKIQDLIISNDYSTNLGLNKSQIKSISIDSLIEKINIFLKSTQDTLHPLGLHALGEYWSEEDIASTVSAMLSHDFVLENNQGTLNLFTELSNYYYSKSYGDLTPFEREFVLNKSYDICKALIYWDVNSVSNVLINGNVKFNNSNFYACLNLAKSYINLINQSISNELNAMLDGLNGRYIPTGEGGEIVVKPSILPTGTNIFQDQSSELPTQDAWNYAKILALLTLADLNDTTEKIIMGIWCVETARDDGALVSTVLYLLGMKPVWTNSSSAGFDDEGNPTGKKVGAMPEVIKLNDLTRPEGWNKKRIDVTIITSGLFRDLYSSQSVLMDNAFRVALARSYLTLINNKTLMNGKYGKELRQALDCVMEGINYYRASNEALKDNYVAQHWIKDCLYYLSIGYNASYAGECAITRIFAPPNGDYGAGISKLVSMSWTWNNTDELAQFYLGRMGNMYSKNYWGDTNPLVFLKALSNSDTIITSRNTNQYGVMDNDDFFDYWGGLSMAVEHVSGKSPKMNVLMYADKDNAYISSLEEVMYREIASRYDNPEWIKGMMKEGYSGARYMSNKFVSNLLGWQVTRPDSVSDDLWNRVYNTYYKDKYNLGVKDWLMSGNNAYSLISMSGTMLSSIHKGYWNADDATIRDIANTWAQATVKNGVACCDCSCGNVAMMQWAVQYVNPDILAQLLPKLYDATENPVFLNNTHNPNTKPENNNDPQVEPSTPNPTDGSSSSSTISNNATSTNSNQHSLSNSQNSQGNAVSDVGDSSSSDSGTFSSEGADVKKAIEINPITQQSASEVGMSLLAVLGVICLILIVGVGYFRDNGKEKKGSNLDELFNEKL

SEQ ID NO: 10624 - protein, 235 aa, Methanobrevibacter gottschalkii
MDVINILWQLGILSAVLIFGIKLGLATGLANMSKKYLALVSIGYGGGVLILTEISSFFTEQITGLIYSYNFEFFLIMAIIMILAGIFTIREYKVFEKNTAAATCMAVVAPCPCCFGSIIVSIMLVAPAVGLGLLNLSVYVAAALVLTIVLTYFASNYLIKFINKPYPIVLGNFMLFLGIYFLLSALFLPNITSMIQNPMDAIEIASPEYLVAVLVLMIIMMFLGGFYFKNNSYLD

SEQ ID NO: 10625 - protein, 214 aa, Methanobrevibacter gottschalkii
MVTTIPGSEILTSGLNMISQSLQVPVIIFLVIFAFFAVVTLGSLIAEYTSRKKVSPDLLEKLIYSISRADSVEELMSIIKNAGIYENQKVILVKILRADSLPNKTRETLARKLIEFEETELGKTIEKTDIITRIGPTLGLMGTLIPMGPGLAALGAGDVNTLANAIIVAFDTTVVGIGAGAVGYFVSKIRRRWYEEDLSNSDALADALLDKLNR

SEQ ID NO: 10626 - protein, 111 aa, Methanobrevibacter gottschalkii
MARRKCKKRFSDNEEDPMTGTSNLVDAMLVIAVGFLIFVVISWNMQSIVFSDTSHDQSQSVQDSHMNVTEVSEGQELNDTLDSVESSGQGYMEMGKVYKDPSTGKLIMVEG

SEQ ID NO: 10627 - protein, 846 aa, Methanobrevibacter gottschalkii
MIVLSISSVSADDLQTKYAGEVSGDVNVVTVNPWTTSGSLTYDIPSEAKDIRSADVYVNVYGGSAKNTYGANANVSLKTANGENQIANESLWIEEGSSDGTIYAVNDHINKCYSDYQMHYDITNSIKGLNGSSITIKVDTFKMENKSFDGKIKLIALILAYDDGDSDVINYWVDATQKWTKTNVTTIFNTEKLSNINGANLINVALSSGDGSFKVNGEIIGDPIVHDSGNYYQYNSWDISDKMKKGQNTELLSMNVGSGSYASLKNVLSVLKVNPIKANVSLATEYADTCYAGTNNTISINVISDKKEKYSIELLADGNVVNSTEIELDGENQTILFLTDPTVREVDDSTVNGADNVKVNYMVNVRFNDVVVSSANKTVPVLYNGNLGKDLSYPSSGFASFENISFTGDIVIDIKNESSYKSGSTGTIEIFNVNLGKDSTIVKGFIYVPYNWFNGKKYVENETMFNVTFNNQTICPAGFHRDQSNLGNYGKYGYGVVVYDVTNSIKNGNNTFVLNKINPTPTIYPSTLIYMYNTTGSEVIKNIYIINGADLLSNTSNNAGRVVQANSNININSKDILDAKLYVFASGAQTNEGNIIINNNVFENVWNGTSKTTDLFATDITDIVKDSNDIRFVATGSTILALQQFIVTTKDAPIKTSVKPTKLSTTYDSGKYFNIKVLDNHKKSVKGLKLKLKVFTGKRYANYYVTTGSNGVASFKKASKLSIGTHKVEITTNNKNYVVKKTISYIKVYKAKTIVKAPKITVKFKKSKYFKVNVKNKATKKAVKNIAVKLKVFTGKKYKIYKIKTNKYGTAYLKTKYLKVGSHKVIVYSGNSKYSIGAKSSIKVRW

SEQ ID NO: 10628 - protein, 246 aa, Methanobrevibacter gottschalkii
MAKNAIITGGSRGIGKAMALKLGELGYNVAINYRSDSSKQLTEDLIEEIKSEYGVDAIAVQADVSKFEDCKKLVEAAVDAFGDEIDALVNNAGITNNSNFIDLEPEKYGAVINTNLVSMMHMCHLCLPYMVDRDTAIVCTASVGGLTGVINQADYCAAKTGVIGLCRALALEFAPRKVRVNSIAPGMIMTDMLRGVNQDELNALAATIPLGHIGEVEEIAGALEYILTAGYLTGQVISPNGGFVLQ

SEQ ID NO: 10629 - protein, 601 aa, Methanobrevibacter gottschalkii
MSPRPIKRRPPEKAVDNKKAIMNILSILKCHKFKLALTIVCAVISTAFTIIAPLIIGKATTTIFNGINSISKHTGTMDFNTLFNLLTIVVILYIISSLFSYLQSFFLVEVSTKISYELRERLMDKILSLPMESVDENKRGDILSRITNDVDSLQHGITQSFLQLTTAVITLIGVFVMMLTINIWMTLATVILIPIAFLVIRSITKFSQSYFLKQLVFKGSLNGQIEETFTGHDIIRIFNQEEISMNKFESDNENWFDQEWKSQFYSSLNGPLMNFISNFTYVIIAVLGAIFVLQKAIAVGDILAFFQYTQSFTRPIQQITRVMNQIQTAMAASERIFEFLDYDDEENPSDKQLTEIKEGIAFENVSFSYTPNEKIIKNMTFDIKKGQKIAIVGETGAGKTTIVKLLMRFYEIDSGSIKIDGVDIEEYDKHSLRSHIGMVLQDSWLFSDTIESNIRYGNLDVSDHEIIKASKQVYVDNFVRKLSDGYKTILNEDSDNISHGQKQLITIARTILSSKEVLILDEATSSVDTRTEKLIQKAMDKLMENKTSFIIAHRLSTIKNADKIIVIENGRIIEKGSHEELLRLKGYYYNTLNTQSEDSPI

SEQ ID NO: 10630 - protein, 568 aa, Methanobrevibacter gottschalkii
MKKLIAPLKNKIGQIFAIFLFLVVQVYCDLTLPQYTSDIVDIGIQNANFQFIIDTGMMMLLMVAISALATVGVSYFSSRVSSGYAKDLRKIVYSKVLKFSNHELNKISRSSLITRSTNDINQLQSVLAMIFTTILFAPLLGVGSIIKAFELGTNLSWIIFVTFIGVVILLVIVIVRVLPYFKVIQEIMDKINRTSREILIGIPVIKAFVRQDYEEEKFRKINEEFYDVNIYVFRNMLIMLPLMTLLMNLMIVLILYFGAYDAMRGSILTGDIIAFIQYSTQVVTSFLMIGAFFIILPRLLVSGRRVNEVLTTDLTITDGELTDISENPTIEFKNVSYKYPNSEKETIKDISFSLKPSKTTAIIGGTGSGKSTILNLIPRLQDPSSGEILIDGKNIKLFKLKGLRDKISFTPQKAILFQGDIKSNMLTGKNDATDEEIENALKMAQVDFVSNLKEEVSQGGSNYSGGQKQRLSIARAIIGKHDFYLFDDCFSALDMNTERLIKNNLKNLKDSSILIVSQRISTIIDADEILVIDNGEIIDRGTHSELVGSCEIYTEIVNTQIDSMEALS

SEQ ID NO: 10631 - protein, 214 aa, Methanobrevibacter gottschalkii
MKKLAIFDFDGTIFNSITDVIICFNKALSTNDFPTLTYDEYVEILGGNIDELVSSCLKDNNTPQNMELVKNTYNTIYGKSNKENSLPFDGMHDVLLKLQEKGILLTINSNRNNDSIRTFVDKYYSDIDFQAIEGHNPVYPSKPSPFGINKILNQLNVSKKEALYIGDSSTDIKTTQNAEVDCIIVKWGYGNQNDYGNEYVLNVIEKPYDILNYF

SEQ ID NO: 10632 - protein, 116 aa, Methanobrevibacter gottschalkii
MLFVQYPKCSTCRKAKNWLDEHNIEYESKHIVEDNPTASELREWWKISDLPLKRFFNTSGMKYRELKLKDKLPEMSEEEQLNLLATDGMLVKRPIVVTDNFVLVGFKVKEWEEKLL

SEQ ID NO: 10633 - protein, 123 aa, Methanobrevibacter gottschalkii
MNANAQLMNFPIDNVIQLIRKKWVVQIINDLFFGKTRFHEFKENKPKLSNRVLSSCLKDMEDNGLIQRIVDKYDKKNVRYYLTEKGQSLNKIIYEMAIFSVDSENYTDKTKTELKTVFKEKLL

SEQ ID NO: 10634 - protein, 425 aa, Methanobrevibacter gottschalkii
MLDIKLFRENPEIIIDSEKKRFRDTINVEKVIEYDNLWREGERKLNSLRSEKNKLSKSFKKAKEEGNFEEVIAKSKQVASDIKELSAKNVEYLKLRDDYRYKVGNLLDEDVPISDTEDDNVVVRTYGEIPEHDFELLNHVDLIKKIDGADLETAADIAGARFYYLKRDILHLNLALIQFALSELEAEGYIPMQTPFFVKGEVAAETSELGEFEETLYKVENEDMYLIATAEQTLAALHRNEIISPEDLPLRYCALSTCFRKEAGSHGKDTLGIFRVHQFEKIEQFIYSTPEDSRNQHDHLMEVTEGIYQKLGIPYQVIAIVSSALNDNAAIKYDLEAWFPGSKAFRELVSCTNCKDYQARKTKTRYGRAGSGDAQVLHTLNSTAIATERTMCCILENYQQADGSVKIPEVLVPYMNGKTVIEAKY

SEQ ID NO: 10635 - protein, 210 aa, Methanobrevibacter gottschalkii
MKTIIVNASPRKKWNTAEIMQSAQKGAESVGAETEYFNLYDLVFTGCRSCLACKLKEKTKGKCYWRDDLTEVIEKILDADALLIGSPIYFGQPTSEFRALVERLIFCIMSYDDGSSYFTGNVNVGIFYTMNAPLDFYEQAMKESLSSTEFLFSFLNGEIVAYPVCDTIQVSDYSKFNMAGFSQEAKEKQWILQFPKDLEKAFEIGANLSK

SEQ ID NO: 10636 - protein, 291 aa, Methanobrevibacter gottschalkii
MYTFYKNEYIYISCHYNIVLYTKIYFVIQDGCDIVTNQKRTRKFAFGNERFGGSYTPGEFEFNFPEDMTREEFEKIFTSRMQALHKKGNDLAEEMFDHKSRKENLKPLSIRVKQHTKEFFKSQSILSPRDVLEMYEEYNNGSEAFINSLIEDQKELENELTEIQEKLHNAKLFRDKLSEMKPPSEISTDEDNIIKLQNKYQNSEIKSIGNETSVGKAESDIIRDIQMYNTLDVHIRNNQYLIITVYTNAQPILYYFKNEYCEEDILNVISRIEEYCESNGIDFSRSENEEI

SEQ ID NO: 10637 - protein, 744 aa, Methanobrevibacter gottschalkii
MRKLSNSTKVLLLILVTFLSLTVVSAHDANATELISDNSNGTCIVSSAAVAEDNQILGEVDKPDLVVNITSDNIDDYFIRGRLKSIYAYATLCISEDIDDLGILTIKSNNVTINGNNHTLKNTVFSIEANGVTLNNIILNITEKFEDNENSAILIWRANNVNIYNTNINYIPPQDTTAYGIYSEGTKRSLNSNLKIINNTINFEGNNPSEGRDYAVCLEYSPNCIFENNTVNARLPLRTIAFDLTTAYLYSEFALAMGISNCNNSTFKGNIINCDVNERPECSFPTLDAIFICDSKDCEFIGNQLTLTDFKSYKNQPNYLYGLDIYRADNLLVEGNNIHVETSGGTFAAGTAYPIQLTGPASGIIIKYNEIFSKCNGPNIGIYSQNFNGENYITILNNHINVTGLAGNHSWALVAGIEAQDDNDIIMNNIIEIHNIRKTTKEDNLYGISYSQETKGTHSYKVVNNTVISDGYYLSHMLDADNTTVTNNTLVRTYKYADTNYDPFKRGDAIGKDTDEIKNNDFSGNRVITIFEYEIEQQGDEIDEGDEFNYEPPTNTGNHSNIINGSGISPLKPGFPGGNPLIPGSNSGGTINTGGNGNVGGFTNPDVADGDKGYIGLPDLSGDDGKSLSRKFNQRANVKTVNSFNNQGDASNSYNNLVSTENSTSSESPSVNGVTASGTISKSASSAGAAGSSGAAQESLKAYEITKNIVENGPYDMIRFIGLAIICELLLIVGYKRKETKNLD

SEQ ID NO: 10638 - protein, 1855 aa, Methanobrevibacter gottschalkii
MEAIIKMKIKKYMLIIFILLTLVNITCIAAMDNDTFTTNVSQNISNINTDEQINILTQKTENINEIHQTTENDQLSFSMHPPDDNYYNNKKGEIYHTQLILTIENFTTFSTANTTMNVHLDWDLYMSKDYYDTCQIRIYENNTKIHAFNVSDQNNAEYEHNAHQTLDVTFPYTIKDRTELKAVILQIESNTLSFEEIKKINLTNLNNNNIIVNNTYFSNENWTNQIKYLKKAINDAPTNSIIYLNNMEILNDEDITITIDKNITIIANNTIINGLDHGTIFTINSQATLTLINLTFTNISTNYIMQNNGNLKIVNNNFNNNIGRLISNNGNLTIEDSIIENTTKYYALFLNNIKTTSENGLIYNKKTLNIKNTTFNNINLNPLTNNNKKLDWNAIIVNYGKAIVTDSKFTNINYRTIYNNAILEIKNTIMENITSTDIFSHTIQYTRQLNNTGKYFSYIRATSSLEGGAIYNIKHSTITNTTFQKITGKSGAIYNKKTLNITNTTFQSINNGAIYNNEDLTISNSTFQTISGEAIYTKNANITNSRFQTISGKALYNIGTLNINNILINKSTGIHNDGILTINNTIINKCGGIYNNNQLNVNNTLFNRCSGVGAAVYNNNIANIENCEIIENHGDADTKWRYVEQPNGQVFSYIVEVYSGVIYNYKNAKINITKSIIKNNDISEESNGNWDTYYGIIKNDGEMKITGCILDGNKPREWIAFWGGDGSINIYNTGKLTYKYNYLLNTQYYTGNIHKPSSFLFNTGNGACDVNYNFYCLKPSSIFANANYNYYFVPYFGEYIPIKLNETRNITLSLGLTNGADYMTFNDWDKLLTPGLNATITTIDENGEYKNITTLLKDKYTFNFNYTHVKGEYIIYSNILNFKSSALVDVGKEFAEMEVNYNNITYKEGNITFHIKIKGNLTTQPTGNITLRYNNEKIILNLTDSECSFTIPEILKPDNYTMRIDYDGDDEYFKILNQYFIFAVYKIPTNITVVAPEVKYGQTGLITITITPGEAKLKGKLYINGIYTKNADTQGHRILRINRNPGVYNISVVFESDEYYMGGVANTTFIVSKWKTNLTLTGKDINAGEDAIVNITIDPGDVRGDAILIINGVNQTIFINNTVTPITISNLQNGTYHVSVYYPGDKKYAPSNASTTFTVSMKTTKLTVNITNNDDLTGNIHVNTDYNDCTGEVGVYINNDNVLIMNLTNGSCNFPVKFKRGNNYIYIHYIGDKYYSYASWNTTRFIEGKAIINTNYNHTIDEQELGYYIIKIFDSDNNPYEYTNFTALFQNKEIHLTTDENGVAKLPIQCRAGTYNITVKYKNTVKKSTVVVNATRMDIDIKDILAGENETITIRLPYNATGNITFKVDNTVISKRLSNGLAIVNISALTLGEHKLTVFYSGDNNYTDQKIEKIFSIKHSLSQIIASSSGVTYGEDVIVTSKVTSGASGSVTFVLNHETITVNLTDSQANAAFTNVPAGNYVITTRYNGDKTYKGSVCDVKINVKKAVPNIMVNTSPLLLNENIRIDALLNNDAMGNVTFHIQGQYSPRNRTVNNGVSSWLISPLSKGSYNLIVTYCGDRNYESITTSKILVLNQNETVLNVNIGDVNADDDLMVYATLNSDNKYKITGNITLEINDKYYKVVVSDGVGLRNLGEFKAGRYTYTATYTGSDLFSMSTIKGSFNVRCNSYKITGNKNIVQYYGTYKSYKVRLLNNNVPVKKAIITVKINKKNIKVKTDNKGYATLKLKLKAGKYSITASYKKVTVKNKVTVKPILITKNMVVKKGKTVTYTAKLLNKYGKKVKNKKVIFKVKGKKYIVKTNKKGIAKIKIKKLKVGKYKIQSIYGKVKNTNTIKIK

SEQ ID NO: 10639 - protein, 862 aa, Methanobrevibacter gottschalkii
MKYKNILFFSIFILFIVGISCVSAQNIDEIGNSSSDDTISLDDDISTINIVDNEISTNVDGEVICDGKSTRDTYSWADFKSEVENANINTIELNKGNIAPSSDSSNQISINHDINIIGGYGYYIGGDSWSSSTKYNYIPIITSGSNLNVKFENVTFQYLSDNVFMKLMGNGNYTFKNCVFSNINATGSHQSVIWLNYGHALIENCSFIKCNCSFGAVTNYYSSWGTAVNNARMTVRDSTFKDNYATTEPGAINNCGQLVVYDSTFENNEAVWWAGAIHTHSNANTTIIRSKFKNNYAGWNGGALYTYSYLTVINSTFTANTAKTNTGGGAIGASSYMSTPKVVIKNSEFKYNTALTGNGGAIVISSGTLNVESSEFTNNTALELNGGAISSSSCTAAISNCKFINNTLNKTAGKGGAVYGTGKGRLTVDKCEFINNAAKDNNSGHALAYYYTGNSNTAAYLTYTNNIFRGKDNGTGSVFVANDKVNIVQYNNSIDDITNYIEPENNTNGTSSGNITIPIGTDILSSSWDVILGDNLNGTSVIAGNYILIPASHDLYCYNYITQDLVWNFTTEFGYFHELLVDGNIVYAPASWDALYIFNLTNGESLTYSNIYQGSSLYKPVIYNNTLYVSSEYGYGINSNNWISMIKHDSDYYYYGSILELNNVSYGTPAILSQPYIHGNTLYVNTIQGLIAYNLVDGTSHNVSGTVGNPIIDANGNICILSNNGAAISLLNSNLEVVASTTLDGTCNKLISDANGNIYTVDNNGYIYYATYTSSSITCSKTKFNINPVSSAMACYDGKLYIGDNNGILWAFNTSKLDEPVLNNAVYRVFDAGSAIVGNIAVDNDGTIYIGTDNGHFYAIEY

SEQ ID NO: 10640 - protein, 1525 aa, Methanobrevibacter gottschalkii
MRLNKSVLFVFMIIFLLSLNFIVAKDINETNLNADSFEIDYDDSISSSYDTNLQKLNQNDIEKTDESLEKSDNSSNRLLNEDNNNGLLGDGDGLKHLYVAPNATGSGLDENDPGDFITILNNTEDNTVIHMLEGTYLLSNITPIYQDGYYHFISIKSKNNISIVGENPDKVKIISNLTPKKRTSFIFSLHNTNNFKFENITFSAIKKDPKKEKTKSYFLLNKNNYIFENCKFIDAYSKFAIIELDEGTHLTINNCYFTSTDGHVGREISPRLFCSVLLNNTIFKNCCRYSDYKIGVMGNYSIFNSQFLEYDDNPLLYFQPYCNLIFENNYVDHPYNFVFFQPSDHYEGSNRMFCSHTTLTFLNGEDSVNVNCGDVINLNASLVDDLGNILSLYKLKFNLFENDLTYTNGVYQKEVTVPDVPGEYYIDVSDEMFTKYLGNCTVKAPIFIVKEAPEFLFDDKNSSTYGEDVIINVDSLDIPDGKLTFRFNNSEIIKNITDYRCSINLGVLPAGEYAITAYYAGDEVYGAKSYTKTFNVTKAKSTISLTKGHVDAIKDNGDVGFYFSTTENGNENTIGIILPDNATGKLTFKLDTDTYSIDITKRKVLLGNLDYGSYIIAVKYDGDNNFNESEECTFTLVNSKPSVDLTLNYSNINYTNPFNVNVTLNQDVVKDTIIFEVRDLEDNLINSTTGIISNKSANATFTGLNAGEYNIIAIYEGDETYCNSIASQRFNVNKIDLEYFTLKADKTISIHDNIKVEALIPVNVGGSITFRINGQDMTVEIFNNRAEAIFDNPGLGNYTVYATFNGDDNYNPHEENINITVIKADANLSVSAENVDWGEELVVVVKTDTRFTGNLSVKIDGVEKIVEITEGQGNVSFSNLKAGKYNVAVEFNESEFFTSSQKDINVTVNKIDSALTLDNDEMVFDYGGSASVTFGYDGAVNVTAEVVNHPEAVIKINEDCIVVSDLDAGQYTLKVTTVPDENHTGVDKEFEVTVNKIDSALTLDNDEMVFDYGGSASVTFDYDGAVNVTAEVVNHPEAVIKINEDCIVVSDLDAGQYTLKVTTVPDENHNSVDKTISITVNKVNANINIEDIVLDYGSHDITVFTGEGIESVNANILNQSYANVIVSGNNISIYNLNVGEYVLQLIVNPDENHNSVSKNVKVTVNKIDSVIDIRNEVVFTYGDAGYCDVYSEGAVDFTVKVINHPEAVININKNGIVKVSALNAGTYIMEVTTNPDTNHNSVTGRVNVTVNKADSKIIIPDIIFDYGNSGSVNILVYNATGIGNVNVVGHPEAITTINGTKISVGGLNAGSYILTATALTGDNYNPVNVSANVIVNKLTTIIGVKKVNGVYGSSGKLIVTLKDSNGNLLTGKLLRVKVGSISKTLTTNRHGQVSVNVAYLIPKSYNAKISFAGDNDLVESSNTAKVVIKKATPKLTAKTLKTKVKTKNKKLKITLKNKKGKALKNTKVTLKLKGKTYKAKTNKKGIATFKITKLNKRGTFKGTVKFAGNKYFKAINKKVKVIVKK

SEQ ID NO: 10641 - protein, 161 aa, Methanobrevibacter gottschalkii
MERENLSGIFSIVLGLIFILFPMFSSNLISIIVGLSLLFFGLSAAFMGFTMRRNGIPYSLISIIIGIVAVILGFGFIFYLDALSFLVGFQLYIVGFIMIVFGITGLISKLNRISSFTSILVLLMGIVSIALAIFALNQPIYIAIIIGIVLIIEGVSFLLND

SEQ ID NO: 10642 - protein, 172 aa, Methanobrevibacter gottschalkii
MSDFEEIINTRRSVRQYQDKDIAEELILKILKAGMQAPGSRLGAEPWEFVVIKNREILSKLGEIKPRVTNAPVAIVLVANIGRAFYKTVWQQDMGAAAENMLLEAVNLGLGGLWNGVAPDEEKMAKIGNIIGIDDIADLKPFCIITLGYPAEGFENKFMDKFDESRIHYEKY

SEQ ID NO: 10643 - protein, 391 aa, Methanobrevibacter gottschalkii
MKNTDYDFESVIDRHNTNCVKWDYFDDELPMWVADMDFKVAPAIENAVLKRAMHPIYGYTIVSDELFESYINWWDRRYGFKMYREDMLYSIGVMPSISSMIRCLTDIGDGILIQSPVYHVFYHVIEENNRKVVENELVYENGRYNIDFDDLDKKLSKVKMMIVCNPHNPIGKIWSREELAKIGYLCSKYDVILVSDEIHCDLTDPDIRYNPFEISSGYEKAVTCLSPSKSFNIAGFKSSIVHTKNTELFEKIRTQLHIDNSDSCNVFAASAVIAAYNESEEWLNQLKEVLFENKQIVKEYLEKELPVIKLVDCDATYLLWLDCSALNAPSKVLSEFLRTNHGLFLSAGIDFGQNGDNFLRMNIACPQILLKDGLERLKAGITALSYINNGL

SEQ ID NO: 10644 - protein, 266 aa, Methanobrevibacter gottschalkii
MIEKSIYENYQIDFNEEMTPADDDYIFIFNHDRELYLNKDKQLANSLDDFDVNFCLYIGKYNNKKAFVANVNTSDSFYQLMEVYEFNKSLYLMGGKAVLVNDWYISHQYCGRCGTKTQIDEKDMMLKCPECGQNHYPRIAPAIIVAIRKGEELLMANHSYHETIRYALIAGFVEPGESIEEAVKREVSEEVGIEIKNLEYKRSQSWPFPNSLMVGFTAEYENGDIKVDGDEILKAKWFKKDEIIRYDSDISISDWLIQDFIDSANP

SEQ ID NO: 10645 - protein, 168 aa, Methanobrevibacter gottschalkii
MVSKNMEKALNAQLNAEIYSGYLYLSMAAYFEDEDLAGFANWMRVQANEELGHGMKFYDYIIRRGSSVTLTAIDAPQTEWDSPLAAFKHVLEHEQMVTGLINDLVNISIEEKDHATNNFLQWFVEEQVEEEENAMDLLAKAKLADGDNRLIYELNKELATRVPSESQD

SEQ ID NO: 10646 - protein, 215 aa, Methanobrevibacter gottschalkii
MNYPDGPTSEAQVDSTEFDADLLHENDLGSVHIHGHFGNVESEVKIAYLIGMHPLESKSHRALFEKLISKEDLKYCYYLYNINVSNKNSESEGRNEGQLLAQESVQKDIISKNYDLFLDIHSNRGPDGPGDYKITNFLFAPGFDDKSSKFMNEILDQIDEIVYYAPKFRSSPSYITEPTAEAGIPTLVYECYSSEPMEYTLYLAEKLISVVDTLF

SEQ ID NO: 10647 - protein, 326 aa, Methanobrevibacter gottschalkii
MIIRAPSRIHMSLIDLNGSYRRVDGGIGLALADPQFVLEVKQIENGIELEFADNVTDEEAIEECREKIPDAARKTIEHFNIDSGFKFIVHETYPPHSGFGSGTQIAISTAHLITETMDIEVESRVLSSVVGRGGTSGIGTYTHDLGGFILDGGHSKEEKPLFLPSGASQAKPATLIARYDFPEEWNILIAIPEIEKHMEGDDEVDVFQTYCPIPKEEVEQVSHLILMNLVPFMLEKDIKNFGWAVSELQKVGFNKLEHSLDASYLPTMQAIEKAGAYGVGISSFGPVLYTFFDESNEDIVEKTKEIIGENGTVFVTKAQNHGFTIE

SEQ ID NO: 10648 - protein, 330 aa, Methanobrevibacter gottschalkii
MENNRTVFIDYLKVIGLLCIILAHISTDESILQIRNFDVPLMVIISGFLAVNSFKRNLKQNRSFLRYYWKRISRLLFPTWTFLIIFFIVMAFLPINGIYHYDADFILNSFLLLDGLPYVWIIRIFLICTFITPVIYYFDKIENDYIQFLILLLIYILYELSIFLKINETNIIFEFILAYVIPYGIIYLLGMISTKTSPKMDRNVSIICLIAFIIQAVIIYLNTGIFQPTQIMKYPPTVYYISYALFVSFMLLSIFKRIDLKPNRVIEFCSKSSLWIYLWHILFLTVIPLIFGELNWILSYIIIVVCAVGATYIQNKILDLTNADIKVLRG

SEQ ID NO: 10649 - protein, 143 aa, Methanobrevibacter gottschalkii
MKIKQLSIFLQNRMGSLSKPLEVLSKNGVNIRAMCMADTSEFGILRLVVDNPEMGKEVLEEHNFLVKITEIIGVEMNDTPGGLTSVLKVIKDNGIDLEYLYAFTHDKEGKAILLLHADDIDKLISSLQDNDIVIVPSDEVYNL

SEQ ID NO: 10650 - protein, 433 aa, Methanobrevibacter gottschalkii
MFWNEEIETMSRPDLEELQLKKLQATVKRAFNKIPYYNKRYSEVEVYPEDIETLKDIEKLPFITKDDLRESYPFGLFAVDIKDIKELHSSSGTTGKPVVSGYTEKDLDTWAETTARGLTMMGLGENDIIQNTHGYGMFTGGFGVHYGSHKIGAAIIPISTGQTRRQIEIMSDFGTTGLIFTPSYGIHIGEVALDDGIDPKKLGIKAIGFGAEMWTEEIRQRVEELFGAKAYNIYGLTELMGPGVGVECEAQKGLHIAEDIYYPEIIDPNTEKVIGGDKPGELVLTNLEREGMPIIRFRTKDLTTLTYEKCSCGRTHARMSRITGRSDDMIKVKGVAIFPSQIEKALLKVGDVEPHYMIIVTRPGTLDEIEVKVEASQDIFFDGVKEMMAIQNKIGKSIENETGIRVKVTLVEPKTLPRFEGKAKRVIDERNLH

SEQ ID NO: 10651 - protein, 236 aa, Methanobrevibacter gottschalkii
MDMISVLWQVGIFASVLVFGIKIGLASGLANLPKKLFAVICMSYGGGVILISYIASFFAEQLVQAIYSYNTIFYIIMASIMIIAGLFTIREWKIHDKNTSTATSLAIIAPCPCCFGSIIASVLIVAPTIGISSLNLSWYASAALVAVMVVTYFASNTIIRFTNKPYPIVLGNFMLLLGAYFLLSAIVIPNIASSLTKNTSPITIASPQNILMVILTFVILLVGGMVLNKKGRNILD

SEQ ID NO: 10652 - protein, 214 aa, Methanobrevibacter gottschalkii
MVLNIPGGEFLTGSLDVISQSLTIPVLVILLVIVIISIITLGGIIAEYTSRKKVPIGTIRDLIYDINLSESIDGLKNIISKAKIPNSQKKVLIEIASAESLGVNSREALARKLFEFEEEKTMETLKKTDIITRIGPTLGLMGTLIPMGPGLAALGAGDINTLANSLTVAFNTTIVGIGSGALCYFIGKIRSSWYDRYLSDLDALIDSVLDYMDK

SEQ ID NO: 10653 - protein, 107 aa, Methanobrevibacter gottschalkii
MVRKSNRRRSKRVEEDPMAGTSNLVDAMLVIAVGFLVFVIISWNMQAMIDPDQSIQEKMQQQKTTEVDQGQQLNETPDTSNSSGQGYTEMGKVYKDPATGKLIMVEG

SEQ ID NO: 10654 - protein, 105 aa, Methanobrevibacter gottschalkii
MEFCPDCGAMLMPKKGKIKCTCGYEKSLSDDDLVEQYHMKGETNPETKVIVTDSNNVALPTTKITCYKCGGTKGYWWTVQTRSADEAPTNFIRCAKCGNTWRSSN

SEQ ID NO: 10655 - protein, 271 aa, Methanobrevibacter gottschalkii
MKNTKKIVIVAIIIVIVAGIALLSGVGSSENIDIVGSTSVQPVAEKLVETYKQTHPDANINVQGGGSSVGIKSAQDGSADIGTSSKELKEDEKQGLTEYNIGQDGIVIAVNNENTVNDLSKDQLKDIFSGKITNWNQVGGQDGEINIITREEGSGTLDAFENIVMGKDTKIRSDAVVQSSTEAVKQSVKQDSNAIGFVSFAHMSNDVKALSIGGVSPSTDTIADGSYELQRPFLFLVKGTPSGDLKEFIDWVNSSEGQKVLNEEKIIKSTN

SEQ ID NO: 10656 - protein, 287 aa, Methanobrevibacter gottschalkii
MSEQFIEKGLLITAMFSIFIILIILGFIIIEGLPAFQDYGFIQFLFGQTWSPNEGQYGLFSMIIGSICVTIFALIIAVPLSILCSIFMAEVANENIKNFLKPVIQTLSGIPSVVYGFFGLIVLVPIVRFYFGGTGFSIFTAGIILSVMILPTIISVSFDSLCAVPNEYKEASLGLGATNWQTINKVIFPASLPGIVTAIILGMGRAIGETLAVIMVAGNVPGIPNSIFSPVRTLTSNIALEMSYATGLHHNALFATATILFVIILLLLVIANYIQRKYKMDVGGGTL

SEQ ID NO: 10657 - protein, 283 aa, Methanobrevibacter gottschalkii
MKFNYISPKRSQKIMNGIFIFSGVLTLSILIIILGYILINAVPILSFDFIFGQVIDAGKSGGISPMIVSSLYVTFISILIATPLGVGAAIYVTEYSKNGLLIRLIRFGAETLASIPSIVFGLFGLTFFVVFLNLGWSILSGGLVLAIMAIPTIFQVTEVSLSSVPSSYKEGSFGLGATKWQTICHVILPAAIPGIVTGIILGLTRSISEAAAVMYAVGSATTIPISMFDPGRPLPLHLYVLATEGVSLPNAYGTAAVLVIIVLIITFFTNYIVNRYQKKIMGN

SEQ ID NO: 10658 - protein, 250 aa, Methanobrevibacter gottschalkii
MDRIIVKDLNTYFGNSHILRNINVTFPENNVTALIGPSGCGKSTFLRSINRMNDLISTFHHDGYIYIDNKDIYDSDVDVVELRKKVGMVFQKPNPFPKSIFENVAYGLRIHGYDDEDFIKERVIESLKASAIWDEVKDKLDQSAMGLSGGQQQRLCIARTIANNPEVILMDEPCSALDPISTLKIEDLMHELKKDYSIIIVTHNMQQASRVSDYTSFFLNGEIIESGKTEQIFVNPKEEKTEEYITGRFG

SEQ ID NO: 10659 - protein, 218 aa, Methanobrevibacter gottschalkii
MDKEYPSISFKNRFKKIESDIEELNDLAIKSNMDVVKLFEEFNENLYFDILNRSNEMDIKTIDLERECIKFMATEQPVAHDLIFMESVIRVISHIKRIGRLFLKIAQSIKNIKDVEIPELIIKKLCYMGDYIEVMLKKSIFAFLNKDTQKAKELSHDDDEIDELYEFILNDSIDMIEDRKILIEIISIARHFERIADKTVNIGSRIFFVMDFKRPDIE

SEQ ID NO: 10660 - protein, 432 aa, Methanobrevibacter gottschalkii
MSRNAYINKDIPLSKIHEVKADLKHYIEVYEKITFIEDIYAGETVKYAIEKRGKTIPTGHTWLKSWNEEGFDGLLRKEGSGRKTKLTENQFKQLKENIIKKQLTSVREVKHEIFEEFSVSYSDRQIRRIMKKLGFGYGKPYVIPAEAPKNASEQLKKNTEKIDLKKDILIFTDQTAVQNKDNTNRIYYELGTKNRQTKITTRIKLNANGYQAVNGNSLILFQQNTHTFEEIKSLINLRIVNCINKELKSELKNILTDDELDENKIYNKLKDENTLETLKNEFNEFISNSNSSEKQFLVKIKNKANKLNPKKHTNIENIQKEIIIKLLNKDNIINNLQNERKLVVVLDNYSVHKANLVIQACEILNIKLIHLPPHSPHLNPIEQVWKSIKKYMAYYLFDTIKFMEELFEKEFYRIVNRDSYYKNWISKFIMVN

SEQ ID NO: 10661 - protein, 295 aa, Methanobrevibacter gottschalkii
MTRSNKTLEDILDVIFYDKPSTQEEIAETLGISRRYVTQLLKPLIEEDIVKRSYVIDLNKYDEIYGSSNPIFNSKQHSAYFLIENMLKNMAEHVKKEVQMSFDAILNNDEKMAEEALELDFTTNNMFEKVRSSVETVVNIDPHSKLSKILLFNEAAYNYERIGDYSGHIAKFVINEKTPVDEELLDILKKMHKYAQKSISYATDAFVSEKLELRGDLMDIEEKMHEKQHDALNLVASQMAENSFEDIEKYNYYIYISRVVKSFERMGDIAVEIIELAAEFHKDIPRPTTPRSFRK

SEQ ID NO: 10662 - protein, 353 aa, Methanobrevibacter gottschalkii
MKGLARIDQDVMDWVEKDKPKCGPYDAIVRPIALAPCTSDVHIVWGNAYMSDAPNRILGHESTGVVEEVGDFVTDFKPGDRVIVPAITPNWNRVPSQKGFGQHCDGMGTGMTFITFKDGTFAEYFNVNHADGNLAHLPDNVSLDQAVMISDMMTTGFYGAELAEIKPGETVAVFGIGPVGLMGVAGAHFMGASRILAVGSRPVSVKVAKEYGATEIVDYHEGDTVEQIMDLTDGEGVDKVVVAGGNANTVGEALSVLKVGGILGNVNHYDGVESIPLPALAWGAGLADKTIRGGVCPGGRARMEQLVKLVEYGRFDSSKLITHRFTNFDDLYEAMILMRDKPRDLIKPAVILE

SEQ ID NO: 10663 - protein, 518 aa, Methanobrevibacter gottschalkii
MKNLEKTLKSVTENPKYIFRLTVQGLMVGIFAGLMVCLYRFLLYGSEHILRDYLNIIHGNILYIILFFIALAIMGLLVDWLIKWEVDSAGSGIPQVYAEVKGHMEANWVKILFSKMVSGVLTALGGLSLGPEGPSVQIGGMAGKGVARLFKGSKTDELRLILVGSAVGITAAFNAPLAGVLFVLEEINHGFDKTLVFIALVSAIVSDFISKVIFGQSTALTFPIHNIPLGNYWLLLVLGVLIGLLGYVYNIGMIKSSDFVNQLKIPSWLKFVLVFMVSGVVALLIPEISDGGHFMMDMLDVAMPSLGVLVFLLVLKYLFSLFSFSSGAPGGIFLPILVLGAYIGAVFGVVIVSVFGLEHTLIYKFVVISMAGFFAATVRSPITGVVLIAEMCGSTESLIAMIIVSLIAYVVPTLLGNEPIYESLYDRLLLKKNREFVKKPSKHVLSEYLVPLDCNYINFKVKDIPFPKNAIVVSVIRNGKYVIPTEDFKIKYSDQIHILADVNDYPFVREEIEELFGG

SEQ ID NO: 10664 - protein, 166 aa, Methanobrevibacter gottschalkii
MSLIFKRKSVRKFKDEKVSEEVITNLLKAGMQAPSSCNSQPWEFIVVSKKEDKLAISQMHQFAKPAANASHLIITVGNLNEAKVIRMIEQDLGACNENILLQATHEGLGAVWLGFHPIEDRTLKLKEYLNIPDHCIPFSVICVGYPAHESEIKIRYDESKVHFDKY

SEQ ID NO: 10665 - protein, 237 aa, Methanobrevibacter gottschalkii
MYKRIFSILIVMVFLMFSVSAVFAESDAVQDTGGESTSRIINVKVIWNDDGQTNNRPDSVTVRLLNNGSVVDSVILNESNFWNGTFKILDNGNYDVEETGDLSSYSISLTGDMDNGFVITNTIKQAPNNGSDDMIVDENSTDNSSDDVNGIIDDSNHTVDQNDAKDENQTENISQAKNTTYNNNDKEKQVIKKENKSVKKNNTNITGIKLKNTGLPVVVLVVVLFIIVITPISRWKK

SEQ ID NO: 10666 - protein, 323 aa, Methanobrevibacter gottschalkii
MVSVNIEAKKTVDVMIEKADALNIAVETLKNGATVLDCGVNVDGSFKAGELYTKVCLGGLADVGISIPGDLSEKFALPSVKIKTDSPSISTLGSQKAGWSVSVGDFFALGSGPARAIALKPAETYEEIDYVDSEADLAILTLEADVLPGEEVAQYIADECKVDVKNVYLLVAPTSSLVGSIQISGRVVENGTYKMLEAIKFDVTKVKHAAGIAPIAPIDPDGLKAMGKTNDAVLFGGRTYYYVESDENDDISDVAAKLPSSAADGYGKPFFDVFKEAEFDFYKIDKGMFAPAEVVINDLTTGKIYKEGFVNVELLKKSFGLDE

SEQ ID NO: 10667 - protein, 281 aa, Methanobrevibacter gottschalkii
MKVFNMEIIDIIKEAFIFPSNNLEKLAIYIVLTFVMGMLVVGGIFSFVFSSQSSALLIVGLILCIAAIILALIISGYQLKIMKSGIDQDEEAPAFDWKNDGINGIKVIVLGIVYFIIPAIIVGIVALITNVPGNLVQIIQEYSTSINATAAVNSTASAMPAVSSASWAALGTSLAITAIIAFVLFIIFAFIQTMGQARLANTGSLGNGLNIVEAAKDISRIGVGKVIAVILLVFIVIMVIQGILGYIYGQIPQLSIISIIITPYFVFFTQRAYGLLYSDIA

SEQ ID NO: 10668 - protein, 181 aa, Methanobrevibacter gottschalkii
MSDLKGTKTEENLKAAFAGESQAHTKYQYFAAKAKEEGYVQIHDIFMETSKNEREHAKIWFKLLNDEAIPDTIANLNAAADGENEEWTSMYKEFAETAKEEGFPMIAFLFEKVGAIEKEHEARYRTLLDNVEKETVFNKAEDIEWKCENCGFIFSGPNAPEKCPVCGLPKAHFEERATNFK

SEQ ID NO: 10669 - protein, 181 aa, Methanobrevibacter gottschalkii
MADLKGTKTEENLKAALAGESQARVKYEFYASQAKKDGYVEIKEIFQESSDNEKEHAKIWFKLLNGGKVPDTKINLADAAAGEHEEWTSMYKGFAATAREEGLDDIADLFDAAAATEKAHEDRYNALSDKIKAGKVFKKDEEIAWKCNNCGYIHYGKEAPEVCPLCDHPQAHFRKQDTSYI

SEQ ID NO: 10670 - protein, 469 aa, Methanobrevibacter gottschalkii
MIENNICLLTDSYKVTHHYFYPKGTEKIYSYLESRLGSEFNKTIFYGLQYIIKKYLEGSVVNQQKIEEADKLISNHIGEDIFNKDGWYYILDNYDGYLPIEIKAVPEGTPVNVSNVLMSVENTDKKSFWLVNYLESLLLQVWYPSTVATLSAEVRKLSKFYLEVTGSSKDNLDFMLHDFGYRGASSTESSMLAGSAHLLSFSGTDTIPALLIPKNYYNDSNLYGFSVQATEHSVMTSLGPKGEFDQILNVIDNAKNGILSMVIDSYDYKNFLTEAGKSDSQLNKAINDFLAVEGNKVVFRPDSGEPVSTTIDCLNILGKGFGSYLTDKGYKVFDSNIGLLWGDGLDYHKIRDILFAMKSNGWAAENIIFGMGGGLHTYVNRDTQRNAFKCSAQLRDGKWFDIYKNPLDSSKKSKTGRFKLINENNSFKTISIDGYGDDCLRTVFKNGKLLIEDTFADIKSKTLNYSNFL

SEQ ID NO: 10671 - protein, 1218 aa, Methanobrevibacter gottschalkii
MHKIRKAIIICLILLIVFIPTAYAADNQTNLGLNSNDVMLSDSYYFDANVDDDLGNGSLDFPYKQLKSNRVIDNSTIYLNDGIYYGFNKEFSNLTVIGKNSEKTIIKNIQFDIKGSLIIQNVTLINSKITNNANITLVNSIFKDSSSFIGGVLKSNPNTFVTITNCTFLNNHANRYAGVIYSNNSNLNICNSSFVGNYANYYGGAIYCEKNSKLTIINTDFTNNHAKNDAGGAIYGMDSDILANYLSISNSSSTFGGAITALNTNLNLTNFNAWNNKAKYRGGVIYSVYGYYIVMNSTFENNTASDGGALFIDSPHSVNVSSNKFIKNNALNIGGAVYIISNKNYFIPDNLFLNNSASFNNDFYKTMLSNLTIGNNNYVLINYNGSHIGNLPSSYDLRELNQTTSVKNQGSGGNCWAFAAIASLESCILKATGNAYNLSEENMKNLMTLYSNYGWKVSPNDGGYTSMGIGYLTSWLGAINESDDSYYESSALSPVLDSFIHVQNILFLKRNSYTDNDEIKRAIIEHGAVSTSVFWKVEKYANGENYYNYEYASGSNHAVVIVGWDDNYSKNNFIKKAPGDGAWIIKNSWGTGSGDGGYYYVSYYDARLAPINTSSVTYTFVLADSIKYDKNYQYDIPGMTDYLLNSSDRVWYKNKFTATDDEYLTAVSTYFQKETSWDLSIYVNNKLMLTQSGNSSASYSTIELNRFIILKKGDIFEIEFKITVDGDAGVPISEIASLNNLFYGENISYVSYDGKKWIDLFDVRWTYPGHTYNDSQVACIKAFTVLNKINSTIVLTITDENNPVEITAKVLNQYGNPIKTGKVTFNIEGKDYIAKINNGFAKLIHIFNGNENKLIIASFSGAGFIESFSDITFCPEQVSIKASDMVSYYNKNSYSITLLDIYSKPVADKEVKFKINNLEYVAITNENGIAAITFNLYPNVYDVIIGFNSINFDNYNVTKKITIKSTISIPENTVYTYNSKYPIKLLNNNGNPLSNCKFKLVINGITNYAHTDSNGAFKYNINLKPGKHTITVINTKTGEKSTQKIKVVSRITQNKDFSMYYGAGRNYKVKVADDYGKVKKNLKISFRVNGKTYYRYTNEKGYAYLKISLKPGKYTITANYKGYKVSNKIRVKPTIITKSIAVKKGKTGKFTAKLLNNKGKILKYKTINFKFRGKTYKVKTNKYGIATLKIAKKYKITRYSIITSYRSEKIKNTIKIKR

SEQ ID NO: 10672 - protein, 232 aa, Methanobrevibacter gottschalkii
MLTINQCYLDFVDKILKQGKETYKDSNHHLIESLGNFYIIDDPLDLKFRAKYQHYTTKMMLDDIKSGKFDIEGCPIKSDALYEYVKSAENPDDQGFVYTYPNRIFAHFDVDQFNTMKKRILTATGSNRAVAVTIDPELDADREDIPCLQFLQCIVRDNELTIHCIFRSNDIFGAFYSNMFFIAYLGLKMKEEVNKEIVGEKLNFGGVHYHSTSGHIYNTDLKAARKLIKTNK

SEQ ID NO: 10673 - protein, 190 aa, Methanobrevibacter gottschalkii
MELEEYLEYVNSGKRIYAGSTQHLFMHESLNNALKITHKINSEYHTPEEIQKLFAELTNKPINKTLGLIPPFNTDFGKNIHIGENVFINSGCKMQDQGGIFIDDEVLIGHNVCLLTLNHAKEPENRADMYPSPIHIEDKVWIGSNVTILPGVTIGKGAIVAAGAVVTKNVEPETIVGGVPVKFIKNVSDD

SEQ ID NO: 10674 - protein, 190 aa, Methanobrevibacter gottschalkii
MTNENFAKKIKDIRARQNMTIEDLAERSGVKLEVLKAMESGEVIPSLTPLTKMARALGVRLGTFLDDTPELGPVVTRNGKTENSLYFSGREDVTNATNLEFHSLGAGKIDRNIDPFIIDIEFEEGEKELSSHEGEEFIYVLEGEIEVIYGKDSFTIGKGDTIFYDSVVPHHLHASGENKAKILAVLYTPY

SEQ ID NO: 10675 - protein, 51 aa, Methanobrevibacter gottschalkii
MFEIELKQQKISNGLIRFFTSILDLHSLLLCLQEYFTSMNNVEIKKMEVFQ

SEQ ID NO: 10676 - protein, 554 aa, Methanobrevibacter gottschalkii
MSELFTELPLGKFFESMVEKQPDHEFIIYPDRNLRFTYKEFDERVDNLAKGMLAIGIEKGDHVGIWAKNVPEWLTYMFATAKIGATIVTVNTAYQSHELEYVLGQSDMRALAMTDAFRDINYFDIISELVPELKTCARGHLVSEKFPHLKFVFHVGQEKHRGMYNTNELLLLGMSYDGEKYQEIKDSVSQNDVINMQYTSGTEGFPKGVMLTSRNIVNDGYYIGENMNYTSNDKLLLQVPLFHCFGTVLGVMAVITHGSTMVVLEEYDPLLAISSIQKEKCTAIYGVPTMFIGMMNHPMFDMFDMSSLRTGIMAGSTCPVETMKDAIEKMNMKEITSVYGLTEAAPGFTQTNAADSFEKKINTVGRKFPNIEVKIVDPETGEEVGVGETGEIMCRGFNVMKGYYNMPEKTAETIEPDGWLHSGDLATVDEDGYYSIVGRIKDMIIRGGENIYPREIEEYLFTNECVQDVQVAGIPDEKYGEIVGAFIIKEDGFDDVTEADIRDFCIGSIARYKVPKYVFFVDEFPLTTSGKIQKYKLGDLGLRLLDERRQRGEL

SEQ ID NO: 10677 - protein, 1202 aa, Methanobrevibacter gottschalkii
MRKNNYLVFLLIFSLFLTISSVSALNVDDNATIEDTNLNSMDVNFDISNGEFNSINIDKTFDTNIDADAGKDTNIEEKTISITNSNNSILSTKENNVKNNFKLNSGSLRAGNIIYISSDGTGDGLTSNNPTNWANGYINAQSGDTISFLDGTYNLVNVNLNKDLVLKAFNEGNAIINANRAGNVFSINNNRNITINGLTFINGKSTGNGGAISFNSGALTVINCRFINNTASSYGGAIYLRDGKLTIVNTTFVNNSADVGGAAIADTISITHSDFINNTADGSGGAIRAYDNLTIVDSIFTNNTSINGQGGALYTPNVDINNSIFVNNTSLNGGGAIYSSNEYLINNSVFVNNSAIDGDGGAVSSYRTGNINNSNFTNNSAKKSGGAAYARESIEIDNSSFNKNYAGAGGAVRAQSEVNITNSNFTNNVANNEGGAIYSNGKIVVNNLTFINNSAIESDGGAIFSVEDVEVDNSNFINNYAGELGGAISAYNELTVNNSNFTNNNAKYYGGGVYANVLNSNRDNFVNNTAEYNGGGAYVFSNANINGSNFDSNTAVNGGGLFSTGNSSVNNSNFINNNAYDGSAIISGNLHLNNNNLENNTSRGYGIVYAENATIENNKFIDNDALEDKEIYVLNELSQSNNTLSPNQIENINANTVKVNTINGTTYLVDLEDGLKGYCLQRTLNFPDYVYLLNNLSLAHNQLTGEDVSEYLKILIYKYYFSDKKDNITYSLWDFTDSDFRNSNNNLTKKVIALYNSGFRVPDSNASLILDNGTQVLFDFYSAGSSTTQNLFLFNITYMGNNYDMKVEKITLNKSVINGNKTKFIIRVTNIGDTILHGVTVFEKEYDGLVYDSYIDEGNNWNYNNGKWIYKKQLNINESAEFTVVFKTIKSGNFTNIIISSSNETTNKTTNNTTTVYTPNLTVEKLSLNRTVYVGNQTVFTIVVRNTGDCDLGEVFVVEKAPEGLAYSSFKGTDWSYNNGKFTYGKTLKVGESVSFEIVFDAVSSGNWTNVVVAGSNLTGNKTGNNTTKVYNPGLKVEKITLDPVVSVGEITSFEIIVTNTGDCKLGDVFVHEDSYEGLRFHSFRGDMWKQKGDTFYYQGVLNPGESASFVILFTTLKPGNFTNIVTAGSNVTNNTTTENKTKVIENHTNNNTNGINKTVNNETKEVNVHKVDTSRATGNPLLALLMVLLMISVTSVRKFKK

SEQ ID NO: 10678 - protein, 321 aa, Methanobrevibacter gottschalkii
MTFLDNISDKINYETLNNIIKFEFDGVSTNWMDENDPFIERIQKSSLNKVFLKEHILKEIEIKNILDEGIDFLNSQKYVNAIESFDEVLFYDEGYAEALINKSYALFGQKHFVKSLRYYKRAIKVNNDLKDVEYHKLLLSCSNKERSNFSKLKLNIYSGDELFAKGEYKKALERYDGALANPSLFKDKILFKLLNKKATTLLKLNDFENALACFKESLNAKISDYAYYGCGVCQYELKLDGASESLSHANNVKKNQLLEKGLIFNEIGLYENALSTFNEIFNNHFKVDELYIKSLNGKMHAMRSLKMDMDEIEDIYSILLN

SEQ ID NO: 10679 - protein, 124 aa, Methanobrevibacter gottschalkii
MKFSGFMNVYQLDDMSWEYQFGGKSLKAQTLKELEVLVGLYGLKWGVLDKNLVEKSLEIDKNNVTGFLNVYKKEGFWHYRGTDLKSHSLEVLKKKVLSENLDWVETDRELAYKNWKLDLRKFKK

SEQ ID NO: 10680 - protein, 280 aa, Methanobrevibacter gottschalkii
MSVFVPGHVTGFFNIENHESKLKNGSCGVGFLLTKGVMTTVIESDNFEFEVNLGDDTIVCEVLRILNLDNSNFKIIQDIQLPIGAGFGTSAASALSLTLALNDFLNLGYSKELCGQIAHMAEVNLGAGLGDVIAQTGSGLVLRTKSGAPGIGEIKSFNQDVYIAYKTFGPIETSEIITDANYKKIISEVGLKYLELFEEKPSLDNFLIFSKKFSCETGLMSPEVKKQIEYFESIDDVLGSSMAMLGNTVFALSYNEDTFKKLNIEELHIDKLNNNGIVYD

SEQ ID NO: 10681 - protein, 177 aa, Methanobrevibacter gottschalkii
MIKLSYDIKNYRKQILDLTQNGDTIIELGCHVGNTTKILLDNFRDSKIMALDNSPEATIKMNEILCDNLEFINADVRLHETLLEVFKRIQKCDILSIDLGGGYHPDTVFKVFYIWSSTFKPKHTLIRNRGILEFFNSAGSSDEDYESCEGFLDSYHDSGIPPQIKEFELWTPNLGKY

SEQ ID NO: 10682 - protein, 263 aa, Methanobrevibacter gottschalkii
MIGKKIRLERIINRNTGRTVIAPMDHGVSSGPIPGIINMDETVEEIAQGGADAILMHKGIVQQGHRGYGKDIGLIVHLSASTSLAPDPNDKVTVTSVEKAIQLGADAVSIHVNLGSETESLMLQELGQVAETCDYWGMPLLAMMYPRGQKVENEHDVEFVKHAARVGSELGVDIVKTNYTGDPDTFKEVVEGAIVPVVIAGGPKVETDEELLQMVRDSLDVGGAGVAFGRNLFQAENPGKITRAISEVVHHDLDVEEALEFLK

SEQ ID NO: 10683 - protein, 376 aa, Methanobrevibacter gottschalkii
MQNKFAWISTPDELWDDKKEMITTALESGIDYVLDFDDIEEIRKLGNVKIIANTDDADIYLVGINGEGDGFVELNDDFTDSIDIANAKKAKSEGKTVCAYIKITDKAHEQLAVRLGSIVDYIILIGTDWTIIPLENIIADLQKLDVKIIAAVRDVDGARVALETLEHGTDGIIFEANDFNNIKKIAQNVIEASQVKYELKLATVTKVKPLGSGDRVCVDTTDMMKPGEGMLIGSYSKSMFLVHSESLESEYVASRPFRVNAGPVQAYVMVPGNKTRYLSELVAGDEILIVNTEGETRTAYVGRSKIERRPLLLLEAKYEGKTIRTLLQNAETIRIVDENNNPLSVADVKPGDKVKVYIETNARHFGIAIDETIIEQ

SEQ ID NO: 10684 - protein, 185 aa, Methanobrevibacter gottschalkii
MSQLRAFLAIDLDDGLKPKINKIIKQFKQIDAKIRYVELNNMHLTLKFFGEIDTDGLELLENKIADVVSEFKPFNIKIKGCGAFPNYSHIKVIWIGIDEDSIIKELHDNLDGEFVKLGFGKDKNFSTHLTIGRMKSAKNKVQVRSTIGEFSDIEIGEMTVNSITLKKSTLTPSGPIYEDLKVFEL

SEQ ID NO: 10685 - protein, 451 aa, Methanobrevibacter gottschalkii
MDYSLILNDIKPTTDETKEINEVSSRIINFLQVLCDENNINAKVNLVGSVAKNTALKGKSDIDIFIAFPLDTDKLYLKETGLDLAHKCCREFKSVPEHHFASHPYVTADIEGYEVDIVPCYAIEDGSQLKSAVDRTILHTRFVKSNLVEGQEDEVLLLKRFMAMTGTYGSEFKVGGFAGYLCELLIIHYGTFENTLKSAINWQYGHVIDLENYGTSRLFNDPLIVIDPTDMNRNVGAALRINKLSEFIQSARNYIFSDNKKNYFYPIKRNLNKNELIKEFNTRNSDIIAIKFNVPNIPIDTLHPQLKKTTEALERKLNDEEFNVFKADYWSDELFSCVILLEMASSNLNDIKVNVGPKIFFNKACENFVKKYGRENCYIQEDFLVHTQKRDFNNALKLIEHIFTSEHIGLIKVGKNLKKSIINTYEFIDLDEISSEEFLDDFIHPGQHIIR

SEQ ID NO: 10686 - protein, 183 aa, Methanobrevibacter gottschalkii
MSEIKKLTADVDVGEYFEKYVDFEKFSKLCIEEQEELGYNWNYPPFDFDVEELWKSYNKLKIIAFKIDFSKEELDHTFEEKELEFVLKRFERIKGRLMNDVYMLENEDSMGLYMGKCNLCMRCTREFGMPCKMPVKMRYAFEGLGADVDKTIEDLFGYKILYAHNGKLPEYLIFVGGLLYDKK

SEQ ID NO: 10687 - protein, 228 aa, Methanobrevibacter gottschalkii
MIVSVIGGTGPQGLGIAERLAIAGLEVIVGSRKEEKALDIVAKAKEEFADYDLNMTGMANEDAAKAGDVLIITVPLAAQKPTLEGIKEFCNDKIVMDATVPLETAIGGKPFRFVDLMEGSAAERTASILKGTGAKVICAFCNISNSHLANIPEEIDCDCLIAGDDKESKEIAAEIIDKIPGVKTIDCGILEKARIIEKITPLLIGLNIKYKSHYGGLRITGIPALDKE

SEQ ID NO: 10688 - protein, 207 aa, Methanobrevibacter gottschalkii
MKEIKFNLDENPFINFLSARYSMSAKINVEKLWKWCHENNKSFFIMSLGCLMNAVNSVPELKRRIINGKAIEHDYLDGVSPIMDEGNKIYREMRVKTPQEFNDILKWHDYIKDYSKNILSGKEEGFTIEMEKRDLENIANFSCIPWVDFDMITNCVLSGNQIQPLITWGKVNEKYEMSISITVSHIFVNGRELGYFYENAQKEFDKF

SEQ ID NO: 10689 - protein, 443 aa, Methanobrevibacter gottschalkii
MKVIIVGGGAGGISTASNIRKLDENIEITVITRDNKVAYSPCAIPYVLSGTIESFDDIVMRTPEDYKNKNIDVIIEAEVTAVDSNKKTVTYQKNGKETVMDYDKLVLATGGNPFIPPMQGVDLDGVFRIRNIDDGMKVQEALKDAKCAIVTGAGLIGIEIAFALKKRGLNVILSEMLPQIVPRSLDKDMSDILVKYLEMEGIQVVLGKPITKLIGDGKVEKACFGDEDIYDADMVIMATGVRAELDLAEMAGCEIGRWAILVNDRMETSVEDVYAVGDCVESKDLILGSNTISQLGTTAVRESKTLARTICGKKSKFNPVLNSMVSKVGDLEFGAVGYTTSFAQQNRIMPVVQKVQALTRARYYPNAKPMDIKVICDGNGTIIGCQIIAEERVAERIDTMTLAITEGLTCFDLSNMEFAYAPPVSMVTDPLILAVEEVSKKFS

SEQ ID NO: 10690 - protein, 326 aa, Methanobrevibacter gottschalkii
MAAHGHGHHGHGGQMTPEQQKQMIEQDLRLAKNLGQIKHKIVVMSGKGGVGKSTVAANIAETLQKLGFKTGILDADIHGPNIPKMLGVDLYGEQFNEYQFKVFKEITESGMADKDFKNDEEKLAFIEAKKEEYKHSMFPVVAPSGLKVMSMAFLLDGIDRPIIWRGPQKTGAIKQLISDAHWGSLDYLIIDNPPGTGDEPLTVLQTIPDADAVIMVTTPNVVSQEDVLKCVKMVEMMNIKQIGLIENMAYYICPHCDEKLYIFGEGNGEAFAEEMEITYLGDLPIEEKVSDAPNNEGAISVIDPNDEVSKRFVEIVKDIQKEFIKE

SEQ ID NO: 10691 - protein, 131 aa, Methanobrevibacter gottschalkii
MKLKEIKHPELKNHINMIYMHGENQNKTAINKTEEEIKGYIRNKEFIISIENGKPVRIPYANDGEYLVPIYTDEKEYIIAMDYFSLNDMAENKEYIIEKLDYFKKLKKDPNFLGYIVNIARVSYIINPTLL

SEQ ID NO: 10692 - protein, 289 aa, Methanobrevibacter gottschalkii
MFANQKVIYLAGGCFWGVEAFISRLKGVNQTEVGYANGRDLAPTYEKVCSGKTGHAETVKVTYNPKIITLEEILENYYKIIDPFSENRQGNDIGTQYRTGIYWQENPQKNIILKFIKDKQKLESNRISIELSPINCFYAAEEYHQKYLEKNPQGYCHVDLNLINNEEFNHLTKEEYEITQLSMTEAPFSGKYTNFFEDGVYVDVVSGEVLFSSQDKFDSGCGWPSFSKPINKEAVIKNRDYSHGTTRIEIRSAKSNSHLGHLFYDGPGGSPRYCINSSALRFIPKDEIE

SEQ ID NO: 10693 - protein, 64 aa, Methanobrevibacter gottschalkii
MFYSTIMKIDSIDRLRDIRDALLVEQGINPTRQGEQAIKVVVERIDEIQATLDKSATKNLNRNR

SEQ ID NO: 10694 - protein, 91 aa, Methanobrevibacter gottschalkii
MIRRVTSGRRLLRKRMYKSPHARHKNATYHRENKSLVKIHQNKFKDMNGPNIKPKRRPKREVLDGFKMSYRYKYYNRDIVEETEESDEKSD

SEQ ID NO: 10695 - protein, 102 aa, Methanobrevibacter gottschalkii
MCRDKKLLEKIAYVQGSEHRKNIILYMEYNLYTPKELGDAIGVRTNHISNLLSQLKKQNIVYCATPNIHKGKLYSLTDEGKHIFEYLKSKEEDKINRINNSI

SEQ ID NO: 10696 - protein, 87 aa, Methanobrevibacter gottschalkii
MDNSVKYILKSSYRVRVLQAIGHDVKTPSQIAKDSSVLNNHISRTLRQLYEHDLIELINPEMHCGRLYRLTEKGLVVLSIINNESVQ

SEQ ID NO: 10697 - protein, 1609 aa, Methanobrevibacter gottschalkii
MKLFNNNFISVLLILFVLVLAVNSVSATDNNITDINNVNSNLSNVLKSSSSLNDGDAISYDLMDNKDVISQKFSSNSNTNDKSNMSDVVDSIESVAEPTSLDSPILRSVVPSGITFDGVFHVGTGQQYSNIQDALDQCRRGGYNYQIIIHEGTYTGYGNKNLVIEPTTWWNPNFGYLDIRTANDGDVVILNAERSPSILTINSRNVHITGLTFMNAYNYGSGGTSGAGVAINIRKGTVSIDNCSFINNEARNLWGGAVHIDSSITNRISNIDITNSLFVNNSAEVGGAFRSERYSSNINIINTTFINNTATEHGGVACLFSTDVTFANCTFINNSAPSSGGIHFHVGGSHIDNCTFINNSAYGTGSSEEGYGGAIALVYSTSDGVIISNSSFSNNFAGKYGGAIDVNGSGSNAKILNCNFENNTAGYGGAIRVQGSNTVIDNNSLINNKAINTDGGGIHVEGSNTQISNTIFRNNSAAANGGALAIVAGDNTFVSNSVIANNTAVNGAGAYIQGRRVTISDSIVANNTADQNGAGVYIDGSYATIKDSTIYNNNATVNGGGAYINGRDATISNVNFVLNNAIPDEEALDDGLGGAIFIAGSNSYIEDSNFTYNTARNGSAIYIDPTSSIANNYIYNCNFTENQAWSYWLPIFYNDVTKTIESNLTGGNNILNAIYNNGSNLHIFIDGVNPVLGWENSQNGTIMYQDNREFNQTIVTLVWDRHGNLVFNETAVTDLAGNVCYDIPQDTHLWFIVSMTHLEDTYYKEITNITGININPGLTITDVTMYEGNSTPQTIYIVLADDDANPIPNEGPIMIYVMVNGNKILLGSGNTSKNAVLILNESAVFKTLNPGNYTIIAECTYAYYNETTQSISNKTVSTEGILEVLPYIWSLNKTISHVNGIPYIEGMVIQINDNVTFNITVFNEVNTTLYGLKLIDLNTEGLSYVSTLPSNWNYEGNNVWTLDNLVNYGNSSLFVTFKVLKTGNLTNIVNCSFLDGFKNKSANITFAVNLTADLGVSKVVNVSNPNYGDFIKYTVVVSNAGPDDATGVVVNETLPVGLVYVSDDASVGSYDHVAGLWTVGSLAKGDSATLIVVVRVGGTGNIQNFVNVSGAEYDNNTGNNKANVTVAVNASADLGVSKVVNVSNPNYGDFIKYTVVVSNAGPDDATGVVVNETLPVGLVYVSDDASVGSYDHVAGLWTVGSLAKGDSATLIVVVRVGGTGNIQNFVNVSGAEYDNNTGNNKANVTVAVNQLKTYIIVFNNTVYPGDDVTVIVTVTTQNGSLFNGNVNVALNDTANTTKVVTIVDGTGSFKVTVDKNLVNGYVIGINASYDGNDTYIGSKGFGWIKVLPVKFHVEKTIVKGNEFFIGDEIIFNITVYNDCNGTLYNLVVSDVLPNGVVLINSGFGLWTYDGGSSWSYGDLSAGASATLIIKSSAVKAGSFTNDAKATVNDVLDNSSLVDFSISKLNTSISVSNVTGHPGDVVVITIKVSTGDNVPFNGDVDVILLDGKKIIVHVTNGIAKFKWTIPKNAKNNTIFSIFVSFAGSSKYFGSNNTGFIKVIDNKQNKTNHTDNNDFTDKCNKGIIKNTGNPLLVLLISIVILVISLKRRKDY

SEQ ID NO: 10698 - protein, 89 aa, Methanobrevibacter gottschalkii
MNFICPTIGEGHEKDFLVTGSLDDFKIIVFSNMEEYKKGFEYLKLADYIPYEVSIELFKKLANNDDEFSGIILDIHSKNKIILKEELLK

SEQ ID NO: 10699 - protein, 147 aa, Methanobrevibacter gottschalkii
MNIKDYEDYQKNNVKASKSQLKEYIQIYADMAKKLKSENALELEVIKKNIKNTFPNEIYFTLVDESGKPVKLTLTEKSKKYIIPIFTDIREYAIGSAKISKLFLDKLEMNVLSPEDISKLADEDEYFQGFVINPHSQNFNMDRNASF

SEQ ID NO: 10700 - protein, 182 aa, Methanobrevibacter gottschalkii
MFICFKKKTYFNDYYTYGDIMSELKELVKKFIEIDDDLNEKIEAALSESEELDDTFEEEHKEQIEQLGNIYHDIEHIVFSEEFIIVSNAKSEQKEIVALIISEEDEEVEEFVIPVFTDEEEANKAIELFKEQFEENEFVCDKKTGNEIVSEYAEDEEFIGLAINAPQWDFVIGGEDVHECCE

SEQ ID NO: 10701 - protein, 580 aa, Methanobrevibacter gottschalkii
MNINNNMKLGLIAAISIIALFVLSLWISQTPANDDNSIRFGILTLLPPLVAIGLAFITKETILSLFMGVFVGEFMLCVNDLNIVSTAINAFLQMGSQIISCMADPWNAGIILQCLLIGGIIQLVTKMGGAKALADTFARRADTPRKAQLFTWFLGLCVFFDDYANSLIVGPIMRPVMDKLKVSREKLAFIVDATAAPVAGIAIISTWIGLEISLIAAGFESVGVTNVTGFGIFLQTIPYRFYNIFILLFIVISSITLYEFGPMKKAEQTARKRKENEEIIVPNAPGFDEVKPVEGIKLSIWNAIIPIGTLIIGALIAFYWSGYTTILGGEDQALIAIMKSSPLSFNGVFTALSQSDASVALFQAALLASIVAIVMAVGERILTIEDAISEWIGGMKTIVITGVILLLAWSLGGVIGDVGTANYLVGVLKNTLPQFIVPALIFILGALISFATGTAYGTMSILMPLAIPLAWAVGSGDMSFTIVCTSGVLTGAIFGDHCSPISDTTILSSMGTSCNHIDHVQTQIYYAIFVASVAIFIGYIPAGLGIPWFISIPIGVVVMYVGLKILGQKVDFDEVEESSS

SEQ ID NO: 10702 - protein, 236 aa, Methanobrevibacter gottschalkii
MKLSKSKVNTYLKCPLEFKFQYIDEVEVPQNKYMALGSDVHLIAEKFAKKFGDNLDNIDIDNELLKIVHEEDIGYDLTPHVDNLSSFFEEVFVENDFKLYSQEEYLLDEENRFSGICDIILEDENGELVVIDYKTSNSSSFSKYRRELCYYKLLVENVCRKPVSRVGVFFTKNGRLRLLDICDEENKRKYLNYKEIDEAIKTLHEVRNNINNEKFPAKKQFLCKYCTYKHLCDAYF

SEQ ID NO: 10703 - protein, 168 aa, Methanobrevibacter gottschalkii
MKRLYALLIILIVIYIGINSFSLIFNDNGTNDANDVNESMITVGASSLPEIENFTDNTLNDTTISLVDSNKNMTILVSEIDNSQSISDIFNNFVSSNDISSTQTIDQNGVTTYLAYSSGSDSYNADIFFNKNGQNYCISGDNILSSDSDYFINHCKGIIDAISINSTS

SEQ ID NO: 10704 - protein, 180 aa, Methanobrevibacter gottschalkii
MKIVALQASPRKDGNCDVLMDEMIRGIEENGGKVTKYYLENQEIAPCKACLYCAENPECVRADDGNKILDEMIEADGVIFATPVYYGQMSAQGKLIIDRFYSIGQNPNKSLSGKAALIFTENQPEHTYDSYIELTKASPFEFMGYDVIGHVDAGNAGPAGIVAEEQKDKLKEAYELGLKF

SEQ ID NO: 10705 - protein, 79 aa, Methanobrevibacter gottschalkii
MGLSSFFKRVKKDAKNEEIVECHIDINTDDCDGCEKCGIACPNNVFMMVDNVSKVRDSQVCKNCKICMAICPNDCITVN

SEQ ID NO: 10706 - protein, 98 aa, Methanobrevibacter gottschalkii
MDFLLVLAKIQPKEGCQDSILELAEELIYESLLEEGNIDYQLLKSSEDDSLTFVEKWESPEYLKKHMASPHFLNFNADCEEFIESNDIQLIEANKIEI

SEQ ID NO: 10707 - protein, 230 aa, Methanobrevibacter gottschalkii
MIYSTEIENMCLVRKGANHDPAPIPEEGKWVKAKEISDISGFTHGIGWCAPQQGCCKLTLNVKDGIIEEALIETLGCSGMTHSAAMAGEILVGKTILEALNTDLVCDAINTAMRELFLQIVYGRTQSAFSEGGLQIGAGLEDLGKGHRSQVGTIYSTKEKGPRYLELTEGYITEIGLDGDNEIIGYKYINLGVMLDFIKEGIDPLEAIKKATGQYGRFDDAVKKIDPRSE

SEQ ID NO: 10708 - protein, 333 aa, Methanobrevibacter gottschalkii
MSLFESYERRINQITPVLEKYGIKDLEEAKQICLDKGFNPYDIVKNVQPICFENACWAYTLGAAIAIKQGCVKASDAAKAIGEGLQAFCIPGSVADDRQVGLGHGNLASMLLSDESECFAFLAGHESFAAAEGAIGIANSANEVRKKPLRVILNGLGKDAALIISRINGFTHVETEFDYFTGEVKIVKEKAYSDGERAKVRCYGADDVREGVAIMHLEGVDVSITGNSTNPTRFQHPVAGTYKKECILQGKKYFSVASGGGTGRTLHPDNMAAGPASYGMTDTLGRMHSDAQFAGSSSVPAHVEMMGLIGMGNNPMVGASVAVAVAVEKAMKQ

SEQ ID NO: 10709 - protein, 139 aa, Methanobrevibacter gottschalkii
MSTLWGLTARGICQFNDKILLLKIRSNSAHDAEKWEIPGGKVKKCEFFDDALKREYLEETGLEIDVQELYNVVRNDYTACKTKEDVKSIQLIMKVSCDNDEVKISGEHDDFGWFSWNEIDEMIAGELLTPAAIMAFSKD

SEQ ID NO: 10710 - protein, 265 aa, Methanobrevibacter gottschalkii
MQKIINAHCHIYPEKIASKAVVGIKDFYDLDMSLNGKVSGLIEDGNKVGVTHYLIHSVATTPKQVKSINEFIAESVNTHPDIFTGFGTLHPDSEDIQGDFDYLIELGLKGVKIHPDFQQFAMNEERAFKIGDVVNKGNVPLMVHCGDFRYNYSNPDQIKPFLDKFPNITFIGAHFAGWSVWEEATEKLAGTPNLYVDLSSSLYDLTPETAVNLIHAYGADKVLWGTDYPMWESVSEMEYFNKLDLTEKEKSQILYENAAKILGLI

SEQ ID NO: 10711 - protein, 216 aa, Methanobrevibacter gottschalkii
MTNNELKLETKCYDANEYGYLYGLNKKIPDEEFEKVKPFFKDFRRMDFVEGNVQVTGRPEGYRCLEKDVSKVEEILGITNTLEKRQNKVKEAFADPVKKANLIDQSYEWLKILFDKGGTRPEQDLSRLAVHSTKIYDPKDSFKRGCEKGEGELFIYTPHGMWYIINNCGEFSDKSLNNVQTPQGGAVGYRLMYYDLIDRLIRIYSEENIYSGKQLY

SEQ ID NO: 10712 - protein, 315 aa, Methanobrevibacter gottschalkii
MVKVSIFGSTGTIGKNVAFTLARMDTVDEIVMVSRPKSLDKVKGETYDMYDALAARDIDCKLIPTCDFNEIRGSEIVLIAAGIHRQPGMNRLELAIPNAKIVRYYSKQIAKYAPDSIILVATNPVDVMTTIALEASGFNKMKVIGVGNHLDSLRLKNYFSRKININSSEVHTRVVGEHGNHMVPLLSSTSIGGIPLKYFEFAKLDVDALVEQLKNAGNTIISKKGATEYGPAFAISNLISTMITDSHKVLTVSFYLEGEVEGVRNVSLGVPAITSKNGIEMIVPIHMNDVEKESFIEAANVVRDTTYKVKENLNI

SEQ ID NO: 10713 - protein, 147 aa, Methanobrevibacter gottschalkii
MKLVVQRVTHASVEVNNEVVGEIGNGLMVLVGFGVNDTKNEADYLSRKLVKLRIFQDENGRMNKSVKDIGGKLLLIPQFTLYASNKKNRPSFHKALTPDIATKLFDYFASKCSEEVDVETGEFGAYMKVDLLNNGPVTILLEKEADE

SEQ ID NO: 10714 - protein, 380 aa, Methanobrevibacter gottschalkii
MTEFSLNVDEIKENVETTLKEEEKKLEDSNIKNQAQDNAVAIFDADLNNPQAREKILKPLDNFGLNEMSRSAAHNEMLATRFVDLTKGGKESDNIGENLMELNREIKDLDPSKINFAKKGLLGNLMNPVRKYFAKYEKAENAISDIVQSLDKSSKVLQNDNTTLLNEENYLREVTNKLLADIELAKQMDASIEAQIQTAEIEGIDEEKIKFVREEILFPLRQRIMDMQQMIVVNQQGIVSLNVIRRNNKELIRGVKRAQNVTVSALRTGVMVASALYDQKIVMDKINIINSTTEHIIESTSHMLKEQGSEIQKHSAETMISPEVLKVSFSEAIQAIEDVSTYKEQALPKMKETIVMFSDLATEGQKVVEKIETTNENLLK

SEQ ID NO: 10715 - protein, 152 aa, Methanobrevibacter gottschalkii
MRRIKQQLTQEECIEILTNEPRGVLALLGDNEYPYTVPISHVYADGKIYFHGAQEGHKNDAAKKYPKVSYCVIDKGVKKKENWWYTFKSVIVFGKIKILTNNNEKRDRLTYLGDKFFPTHEETIDEINKLLDRTEVYEITIEHMSGKLVREK

SEQ ID NO: 10716 - protein, 219 aa, Methanobrevibacter gottschalkii
MINNDWDLALNDEFEKDYFLKIKDFVSEEYNSKTIYPPYEDIFNSFKLTPLSNTKVVILGQDPYHEEGQAHGLAFSTPEGRPIPRSLKNIFKEINNEYSYPIPESGCLEKWAKQGVFLLNTVLTVEKGNANSHSNCGWQTFTDNVIRILNNQTRPIVFLLWGKQAEKKKELITNPNHLVLITSHPSPFSARRGFLGSNHFKLANKFLKENNIDEINWKL

SEQ ID NO: 10717 - protein, 188 aa, Methanobrevibacter gottschalkii
MEITADEMKKTIRKIYDRLDKVSPVDFDCGKLCGEICCVYDADDYHNEDLALYLLPGEELMYEDSDSYKLYYIDSSEIKYPHSWKGQIYLVKCINPPKCDRSIRPIQCRTFPLIPHLNKKGEFHLIFDESEFPYKCPIVQNHIKLNDDFIQVTYEIWSILIANPLVYDLVDMDSRMRDNRKTDYEIII

SEQ ID NO: 10718 - protein, 461 aa, Methanobrevibacter gottschalkii
MKIEFETYVIFVSFITSFFAVFLSNGIIIGVPAIAQDFAMNNVIQNWVPTIFFLVVAVFTVPAGQISGKFGVKKSLLAGITVFLLGSIGACLAFSTESFLIFRIIQGAGVAFLNVSAMAMVVHAVKPQNRGKALGFTVTGVYLATSLSPVICGFLVHNLGWRAMFYFVIPFLVLCIILLILKIPQEWKTYQHDTIDKVGSIIYAIGILLFIYGFTTLITTNGKILTVTGIILLVIFGAYELRQKSPVFNMNLFKNKKFTSSNIAALCSYLAIMVVTTILNYHLQYVRGWDAQMSGMILIITPIIMAIMAPNAGKLSDKIHPQKLAATGMAIATIALGILTFLNGETPIYFVIIAMILQGIGMGLFSSPNMNAIMSSVPPKDAPTASASQATMRTIGQTMSLGLLTLVFAWIMGNLELSPQYTTMIIQASQTICGICTAACILAIFASLIGIKSSDKFNTGR

SEQ ID NO: 10719 - protein, 147 aa, Methanobrevibacter gottschalkii
MDKSPDVFDNAPIIGWIHNISKNQLKYLNSQIQELNLGREVRYIMLIHDNPNCSQDDLVNIYGESKANVAKSLKKLENNGYITRNMNPENRRKYMLKTTKKADELIPKIRKISLDWEIKVGIDENDYELKEKIRQIAINGMKLIDNN

SEQ ID NO: 10720 - protein, 99 aa, Methanobrevibacter gottschalkii
MNKIEIELTDEQLEKVKQLEAQNISVGQAIDMLFEVKEKALFEIEKIEKSGLIDKVSNINVNNKTENLEENYGDSEKTYEMEVQDIKHRIKWGKDFFKF

SEQ ID NO: 10721 - protein, 228 aa, Methanobrevibacter gottschalkii
MNRKTKIIIIAIFLIIASILFVGNRFFIPHYETIADTDIGTVEVATYGNANATKCIALITGIHPRETLAINPEIDAAKQFANDDVKIIHYKVTVTKNAQDYSKGRANGESLVHNYVNPNVTASDADAVIISHSHIPEYGEGFYVATPAMDNASVKIGENINQSSDFNYYPVTGNETYKSTSAVLVSKPIAEAGYPTFVYEVPENVMEFIITGKTKDLFQLIIENTYDN

SEQ ID NO: 10722 - protein, 484 aa, Methanobrevibacter gottschalkii
MDYDVIYIGSGNAAWQGGRFLRKAGLKILIIEESLFGGACANRGCNSKALLDAPYEIKALADNFEGVGKSGNFEVNWPDLMKFKQQRISGMSKFLDGKFKEYDLDVAHGKGILVDEHTVKVGDDTFTTDKIVICTGLKPVIPDIKGKEYLHDSTDFLDIAELPKHTIIIGAGFVGMEFASIIAEAGLEADVIIRGNMALKYFHQPYVQNVIEILKKKNIRFHFNQTVKEIIKDNNVIIDDPESKVSNVENSMNSDELLRDPQAKINNKAYENAFTVNLDSGCSITGDYVIAAMGREANVEDIGLENVGLTYTKKGIKVNGHLQTAVSNIYASGDVADVGIAKLVTVAIHHSKYLAKELLGKADEITYPVIPAVAYTIPRIATVGVPAYIAEESDDYDVHTIRYGNSYSLELKNDRTAEAKVIVDKDLNIVGAEIYAADAENVANMFTFIINKKITLKDLDEMIYAFPSSSSVCLYKLHNIHYKL

SEQ ID NO: 10723 - protein, 984 aa, Methanobrevibacter gottschalkii
MNKKILILLLIAILTFSVATVSASDNTTDDSVIDSSNRDVVSVDDNNVVSDEYAVNKVSNGALADVNGEENVNNDVDMVIDPINNVSVLQGDNVDVNITVKNIGENNASNVTVNFELPDGFSLIDSNNVSDNTWHIGDLQSSKSTNITVKLNNSGINNGDYVINLTLRANEGIEEIFKQNVTVNVIKKLIQTNLTIDFDKESYVYGDDVGIDVKLPDDATGNVTIKINGTENNASINEVLILSNLTPGNYEVNVTYSGDDKYNGSSGKARFTISKANTTAAIDIVSIKVDDELNITINYDSEINGNATIYVDNIKNQTIEIIDGNGNVTIKGLSKGMYDIKVAFDGNDCYNSSETNKTIEISKNTVNMLINVGDIVYGNDLVINLKLPDNLTSNVTVSLGDINRSINCSGNVTFKDMNAGNYTAIVSYGGDENYFNETKYVDFKIYKASTQTTVNTSDINIGGVLNVSVDPKIDGTATVYLNGTKYSDDIVIVNGSGNVVISNLIEGTYNVLAVFNGNDNYNSSLTNKSIKVSRNVFNITVNVTDVCYGQDVIINITLPGDVTNTVDVVFGYNSQNINLENGVGTVKFSDLDVGNYNATVIYYGDAKYLKSTQIISFNVTKAKPTVDVNISGNKLGQDLVINIALPSDVKNNVTVGIDNISQDVKVTNGVGKAIFKDLTIGEHVLIIDYSGDSNYLNTTEGIYFNVSKAIPVIDIDVKNIYVKGKEVIDIALPDDATGSVTIFINGVEQKTVNDNISSIVLTKSGLAAGTYNVMVSYTGDSKYESANTTVQFKVSKYKAKLTASSKTYNVKVKTKYYYITLKNNKNKVMKKIKVYLKVNGVTYSATTNSYGKASFKLSKLTKKGTYDALITYKGTSYYNKLTKKVTIAVKATPKLTAYSAKLKKSVNAKKYSVTLRTDKYKAMKYTKVTLKVNGKIYTLKTNSLGKATFKITNLNKKAKFLAVISYSGSKYYYSATKKVILTVR

SEQ ID NO: 10724 - protein, 160 aa, Methanobrevibacter gottschalkii
MSQFSIRFAEKEDVSLVLQFITELAEYEKMLNEVIASEELLNEWIFDKKVAEVIFAMEDDKEIGFALFFHNFSTFLGRGGIYLEDLYVKPEYRGKGYGKNLIKRLAEIAVDRGCGRLEWWCLDWNRTSIEFYLSLGAEPMEDWTVYRISGDTLEELGKKE

SEQ ID NO: 10725 - protein, 95 aa, Methanobrevibacter gottschalkii
MNSNKIKIEFEKEDNSSIAYDGNRQIGQCHFARLKQNWIITLTDVEKDYQGQGIGKKLVEKVINEARKEKVKIVPSCSYAKKLMFENPKECKDVL

SEQ ID NO: 10726 - protein, 78 aa, Methanobrevibacter gottschalkii
MSKQEELEQKGYKTYSNDEINVFWNPKLCQHATECIRGNNKVFDVSRRPWVDVSQAPAKEIAEIIDRCPTGALLYELK

SEQ ID NO: 10727 - protein, 549 aa, Methanobrevibacter gottschalkii
MKVIASTRNDDLKRLNEIYKVLKKNDFGYLIEENTFFRKFPFLRNYKIEKEDNFSDESVPLRIRKVLEELGPAYIKLGQMLSTRPDLVGLEIAEELQQLRDNTPITPFDEIKEVIEEELGKPMEDIYSDIDQNPLGSASIGQVFKAQLKRNGEEVAIKVQKPNSREIIESDIKIMKFLAKRIDKYISSSKTFNLPTIVNEFERSILKEINYLEEVMNMQNLSKNFKNVNYIKIPNVYIDYCSEKIITMELIKGITVTELIEGDYPHINKRLIANYGLKSYFKQIMIDGYFHADPHPGNLIVTRDNKLCYIDMGMMGILSEDFKENLAEFMLLLISGNTDNIIKQLIYMNIISPSQNTPELRADINDLLNLYYGAELKNMDGAMEDLLNAMVKNNVVLPNEFVMIGRGIALIEDTGKKLDPNFNAATELKKLSRKIVVNKYKPERLAKVSLNYLLQLEHLAKDLPDTINSTISKLEEGNIEVKLKHEGIGHLINQLSISLILSSLIIGSSLALITDVGPDLFDFPILGLIGFVFSGVLGAYLVLINVIER

SEQ ID NO: 10728 - protein, 445 aa, Methanobrevibacter gottschalkii
MLNEFFKLSENNTDVKTEVIAGLTTFLAMSYILGVNPGMLAEGGMPATGVFFATALASGIACIIMGLVSKYPVGLAPGMGMNALFTYTIILGMGNTWEAALAAVFISSIIFLLITVSGLREAILNAIPHNLKLAIGAGIGFFLAFIGLKGAGIIVADPSTMVTLGSLFSAPALLALIGIAVTLILYVRKVPAAVFIGLVITAILGIIFTAAGFGVGDIAMPSVPTEFVSTTIDTSVFGAFASGFSQLFTNIPNLILILFSLLFVTFFDTTGTLIPLANQCGFIDEEGNADGIDKAFLGDAIGGIIGAILGTSTLTAYVESATGIGLGGRTGLTAIVTGILFLISIIFAPTVLALFTSSVTAAALVIVGILMMIQLKDVDWDDLVVVASVFMTIIMMLLTYSISLGIAFGFVTYAITSIAAGKAKELNWLVWIMVLVFIIYLFFGL

SEQ ID NO: 10729 - protein, 692 aa, Methanobrevibacter gottschalkii
MLNMYYDMMINKYINQIDTSIDALELKLRVWDFINSLDKTDLSEEEIKNIVSNIGNLGTTLEESNSPKFEWYLNTIVDNDLCAKCGACSIVCPNHIVEFEEKPFIVKECLRKGNGMCQEVCPRVNAGSYEIRTRLNSFEEYYYGKSDIKGQSGGVVTKFLEYLLNDKKIDGAVVIGGSHWKPSSMLVTNSQDLLNLHKIDIDSTPKSRYSISSLNAIMEAGEMGFEKIAVVGLPCQVAGLRNIQYHQFNSKHDAERGWNGRPAKIPKIEYVLGLFCTEKFEYSKILDKINTLGINVDDIVKFDVKGPNFLISTETEDYEIKLNEMEPSPGCLMCRDFDAELADISFGEKGSPKGFSTVVIRTEKGKIIKDYFDFNNDVDIEEIEFMRNFKEKRFQKEIKHRKESGKANSYYYLWRFGGVGMGQKGRAYLRFRTTIGGYYDADLLMEISAIAKKYGGIIKLTSREEIEIQGIKLDDVEDIVYDCKDLPLVNGTEGPLVRSLMSCPGKERCLLGLINTSEIAEKIEEKYAEKPANYKFKIGITGCPNKCLSVSTTDFGIHGVKTPLTNDNCNGCGRCEDVCKINAIEITGKNAITDYDSCISCGKCIPACPNNAKDIKYKGYCLSIGGKGGRETILGHEMYVDSEDEIYKTLDAVFEVYNKHAKNPQRERLASTIKRIGQLNFFNEVEKVKLSK

SEQ ID NO: 10730 - protein, 461 aa, Methanobrevibacter gottschalkii
MIYKCLICGHIHNEEATGVLLKDLDKCPTCKQDISNFVEFENSDSDYKIQNEPTDLSYPKEFAKSDKDIRHMDTIHQIAISGESIISSMYTELPMPNWDDILILGCQLNPQPIESNIDVNTTTVIGKNAKIPLVIESPIYITHMSFGALSRESKIALAKGSASVKTAQCSGEGGILPEEMENAYKYIFEYVPNKYSVNDENLKNSDAIEIKIGQSTKPGLGGQLQGVKVTPEIAKIRNKPVGQDIHSPATIPEVNSKHDLKELVSYLRKKSRGRPIGLKFAAGRIEEDLEYACYAEPDFITIDGRGGSTGASPKIIRDSTSVPTIYALSRARKYLDEHDKDISLIITGGLRVSSDFAKALAMGADAIAIGTGALIASACQQYKICQTGHCPVGVATQDMENRERFKIESAAKRVENYLKVSNEELKQFSRITGHDNVHDLNMNDLCTINSEISNYTNIKHT

SEQ ID NO: 10731 - protein, 1061 aa, Methanobrevibacter gottschalkii
MLITLLCLFTVSAKEIYVSSDGSDDLNGTDLNNPCSFHKAINISEDGDSIKMKAGNYSISEEVDKSLNISAYSDDVVNIKNKFSYVFKVKNNNSLVLNSLNFKNFNTAIESYSYPNIMIKNCLFEKSSYMCLNMRGGTTIITDSIFRNNTGSQGSAINFQNTLYKNRSYLHINNTIFDSNHGTNLGGVIYISLSNMYLYNNTFINNKAGYTGGVIFNDVSKVYDNRSRYINNGALYSGGAIYIRGDKDLGSYYGDHVEFINNSAPYKNGDSGGYGTSGGAFTAVDGGEIVLKNSVLEGNKAMSRGGAIWSDQKVSIINTLISNNSAYNETGLTVGGGLYCPLLKVNIINSTFSNNHAKEYPDIFNDITFPSVDIVENINNTDGKKISIKNLTKPVSYCLQPGILNIASSPIIETGTNKLLGSGGYFNGKPIGELLKIFIVQNYQRVLDKKISENTFKSMLGFISSGCSSLPSPFNDSYYLSHRLIKETLDEYEKGVRYPDVNATGPINWLTKKYLTFDFYQFSNEDHQDLIVFTFNESNTTLNPPINVTKKSNTTNPDFNTVVSYVITVKNTNKTSMVFDALVIDTLSEGLVYNGASHNGVYNNTTNTVTWILNIPADSEINLFVNATVEKFGKLNNTVNVFNKTANVTVNVPNTDVTKAVNVTRPSFNDTICYTITVFNRNPNVDLMNLVVRDVLDDGLVFNGASSGGVFDPISRTIIWTINITKGGQAVIYVNVTVNKYGMLVNKVFVDNKTANSTVYVPIEPPVNPDMTVVKLSLNRTVYVGNQTVFTIVVRNTGDCDLGEVFVVEKAPEGLAYSSFKGTDWSYSNGKFTYGKVLKVNESAGFEIVFDAVSPGNWTNVVVAGSNLTDNKTGNNTTKVYKPDMAVEKLSLNRTVYVGNQTVFTIVVRNTGDCDLGDVFVVEKAPMGLVYNSFKGTDWSYSNGKFTYGKVLKVNESASFDIVFDTISPGNWTNVVVAGSNVTDNKTGNNTTKVYKPPVNPPVKPPVNPPVNPHKIEKPDNEKDKIIKKDSSINIRKTGNSIFLMMLSVIISIPLIRRNQK

SEQ ID NO: 10732 - protein, 449 aa, Methanobrevibacter gottschalkii
MKTKYDVVVIGFGKAGKTLAAKLGKNGKNVALIEKDANMYGGTCINVGCIPSKRLITDSLNAPKGEFSLKSEYYRNAIDEKRKLTAALRKANYDKLAQSGVDIIDGIASFTNENHISVQTNDGIRSIEAEQFVINTGSAPVIPKIDGLTESQNVYVAETIMDLEELPSSLTVVGGGYIGLEFASMYANFGSRVTIIQRGNIFLPKEDEDISESIREVLEAKGVQIITGAKTTKIQDGSLYYDANGESHVLKGDAILLATGRMPNTDGLGCENAGIALTSRGAVVTDEHLRTTANHIWAAGDVCGNLMFTYISLDDSRIILDDMNGNGKRTTENRGAFSYSVFIDPPFSRVGMSEKEAEDAQIEYHVTNLPANSIPKAKVLRETEGMLKAIIAEDGTILGAELFCAESPEIINLIKLAMDHQLKAETIGDFIFTHPTISESLNDLFSNAK

SEQ ID NO: 10733 - protein, 81 aa, Methanobrevibacter gottschalkii
MQLITKDNNYRRINELLEKILDKTVKRKHGISQEQPIFMGDDKPITWTELKESETGTTWSQGNITLTALFKYNQGGFPRFI

SEQ ID NO: 10734 - protein, 191 aa, Methanobrevibacter gottschalkii
MNKKVVVAIVVVVIVAILAILMFIGSSNVTLMAGDSCITLPSDYMLDNKGIAYKNDIGIFFISVSGNSPKDQKELFDAIKSNGKSSGYKNVTKDKVNGFKLYEYEANPDKLKNVSSDRKISGSYETWKTYSPYTPYEDVSDMDVTKFRYIAYVNENTDDISELYIFTNNTNVDLYSGEITKIIDSIAVVEE

SEQ ID NO: 10735 - protein, 118 aa, Methanobrevibacter gottschalkii
MMIITTILGTLVALEFFYIMYLETFATNSDRTSKVFDMDKSELERESVNTLFKNQGVYNGLLAVMILLALFVFVSKTALSVLMAYIILVAIYGGITSNPKIIFMQGGLAIITLISCIF

SEQ ID NO: 10736 - protein, 73 aa, Methanobrevibacter gottschalkii
MFNSKFLILILGVLIIGLALFGYFGLSDNALESDSSLNESHDDVVYLWMLDDNDNLKLIPTTETYSEGSGSNS

SEQ ID NO: 10737 - protein, 342 aa, Methanobrevibacter gottschalkii
MINKRFILVFVIIMILHCSAVSAYENYDDFVFNNITIDDSGHDDTKLIDEKSFYYYEEDSGYLSDNIVGGKNIKNTTGVVMADDEYSCGAASFATVLNNLGNNITLYEAKIATNTTLNGTTMKGIIDATKKYDLMGVGVKLETVQLKENYIVNMNILGITHWSVVKEINEEFIILADSNLGNYKFDIMEFNQYYTNQTIVILNKQQYNNHISIVSNNTNYISNIDQKYISGNGYAFYVSKSMSYINANPKGYAFKYTIIVPKWGGKVVKLSTKKLTKHRITVKVIYKIKVYSKSHFKGKVETIHQPAIFNLAHKAGTKFSVSRPTSFPIQSIKYTVSYSHFP

SEQ ID NO: 10738 - protein, 503 aa, Methanobrevibacter gottschalkii
MILAVAFPESFRQITNSIRDFLGIHFGWFYLMVVFLCVVISVIVIFHPMGKIRLGDPNSKPEYSTFSWIAMLFSAGMGIGLVFYGAAEPLSHYAVMAPETTVFTQQAMLDALKYSFFHYGISAWAVYGMVALAIAYFKYRKKEVPNISSTLKPIFGKYTEGNIGYVVDALTIFATVVGVATSLGLGAVQINSGLNYLFGITQSINVQIIIIIIASILFLTSAVSGINKGVRILSNTNILLAILLMLIAFVIGPSLDIANFFIESIGAYMNDFIRMSFRTAASGTVAQQGWVQSWTIYYWAWWISWSPFVGVFIANISKGRTIREFLTYILLVPSIFSFVWFSIFGTLAMNGTTPGSPIIKMPISNMLFGIFNQYPLAIILSILAIILIIIYFITSADSATVVLAILSENGNEETSKKIKVIWGIILSSTATILLINGGLDGLQNILIITAFPFSIILMLIVVSVFKELVYEKDEMRLFVKAERHPTVDRPFKSYENQNKEDEE

SEQ ID NO: 10739 - protein, 133 aa, Methanobrevibacter gottschalkii
MKIFLDSSFLIALINDNDSLHKKALEYVKLTEDNECYISNLIINEVITIIGNKLGLTVAISSYDLLTSVFNIVNEYKLADFNSKVMLIYEVYNTKLSFTDSSIIHIMEKEKINNLLSFDKEFKRVEDINLISL

SEQ ID NO: 10740 - protein, 78 aa, Methanobrevibacter gottschalkii
MVNIGTTKIYKNNQITIPSKIRKELNISKESVIIWSLNPDKTITLKVENKKPSVKDLIGLGSSKEVTNAVDLKRSLYL

SEQ ID NO: 10741 - protein, 110 aa, Methanobrevibacter gottschalkii
MAEYTSIRIRKDLAEQMQIIKKQNNYKSINELLEKTLDKTVNENMEVIQEQALFYIGETPITWTELKQSTNGTRWNQGNETVTILFKDNQGAFIRFEYENEVEVEYYHFI

SEQ ID NO: 10742 - protein, 401 aa, Methanobrevibacter gottschalkii
MMNIETRESLFQPGQPVSADRFKGREEIIEEILKYFPSVKSGNPHHFFITGKRGMGKTSLANFISDFANKNYSMITAHIMNDGVHSIDELIVQIIEGILNSIKSEKWSEKIFGFLEDHIESVGLGGMNIKFKPSNQELKNIKDNFAFYLSDLVNNFKDKDGLFIVIDDINGLSETPDFANWYKSFVDTLATSVDNAPICIMLTGYPEKFIKLHEQNPSVNRIFHVHELNRLDDDEIKNFYTDIFLIYDINVEGMALEAMTKYSSGMPTMMQEIGDATFWSDTDGFIDREDAFKGIIEAGNRIGLKYLQPLLDQKIRSENYLSLFKKIGNELAASPNSTFTKKTFSDVLNDNESKVFKDFISRAKKLGIIELASSKKQGEYQFTNQLYPMYFMIQTFKEEAL

SEQ ID NO: 10743 - protein, 78 aa, Methanobrevibacter gottschalkii
MSGTDELLLKIFFRNYDEEERRNGLIDNKNSQMIVLTGTMLTLQATLFSVGLLNEFVYNKIIINPVKFWIYAVLNNST

SEQ ID NO: 10744 - protein, 114 aa, Methanobrevibacter gottschalkii
MEKVYCTECGNELEGGSKFCPKCGNKVDDETFSIEVSPSKSYKSYIIIGYILAILGIILPILAIFGAIVGFYLIYRNYGDLLSGKFNKTNVNALLILIFSIFAIVFMFNVGFIR

SEQ ID NO: 10745 - protein, 171 aa, Methanobrevibacter gottschalkii
MKIGDFEIGLKTIILVIVALIVIFGIISFFSGGDSVNVTDVGMTVNYNYKTNVAFTIIPTDTITEVNNVQLKNIEVTYHNGKTQHLEDVTFNSKNTYVKDNEYGFKFDYTISDDCIDGLDEYDFGHATHHIKGDIVINTVGGNEKVVGHIDYDVPASATVYKYSSGSGSVI

SEQ ID NO: 10746 - protein, 158 aa, Methanobrevibacter gottschalkii
MSKKIFAILIVVMAFVSLASVFAVETTTHDFDGLFNMSVPSDEEFVTLDSNITGASVFGYNFNYGDPIGDNIIVYYFNESIVDDNDTNITEYVINILDENSTFKHPSVEDGFTVLYNQMVQHDGGYMLIASNDNETEVVGIVGDNLDDLKTYANSIEF

SEQ ID NO: 10747 - protein, 92 aa, Methanobrevibacter gottschalkii
MSENESEPNFWSLIGYIKVSPARLNCITCIGTEYKMPKEIVDATGMRITQISNALHDLKEKKIVVCLNEENIKGRLYQNTELGLQLLEELKK

SEQ ID NO: 10748 - protein, 183 aa, Methanobrevibacter gottschalkii
MQREMDEQKEQYEKKIRHVESVNSALSSQVLDIQNQLDNLANANDLKRIQEYISGHELVEKYNLASTIIGYYKEDVKKEDFTGVTDYYIEDLITQAFNTTSAFQSTAIRDEYYRTDDNWKRIYSEIGLYEHDYIESNGYVLSKSQSKKITDELESYSIKLWEDNEKVKKSKVQSIIDNIVLRH

SEQ ID NO: 10749 - protein, 331 aa, Methanobrevibacter gottschalkii
MKIIIDGYNKSIHKKDNMIIIEENSQTIDAIKANMITDITITGKGYVTFDALNLMAQNNIKLMAINPRGQLNYILESPDWRNVKLKKQQYMLSENTLGLELSKELIKSKMKNQKATLTTLNKNKQLKRVFNHRLKIDEMIAELEKINLNGDNEKIRMKIMGLEGKASNEYWRAIKYFIPGEIGFDGRTKKPTDLLNSMLNYGYAILASEITKNILYAGLDPYCGFLHYDMDKRTSLTFDLIEPFRQQIVDKTVISLINKKQVTNNDLDKRNNTIKLEARKLIANKILKKLFSTITYNDETVTYSDLIRKQSENLVSALLYGEKFIGFYLRW

SEQ ID NO: 10750 - protein, 89 aa, Methanobrevibacter gottschalkii
MLVSFDIKFKTNREKIERVFECLGLRKIQNELYIGEMDNKEQNNLVEKINAIIKDYDSVLIMPICQNCYLKKETCGREIKFQNDLYRVY

SEQ ID NO: 10751 - protein, 360 aa, Methanobrevibacter gottschalkii
MIEVNELTDYLDEYLEEKQEVKNLTEETIKKQTFNISKFIEYLENEGIDELNNSNVKKQLRHYRRYCLKQRGNKRTTVKTYMMNILEFINSEDVQEEIQHDPIKMKDIIEVKAEDPETAKKRIEKISLTWPQSNFFLDTIKQSGNIRDYAICRTFIDSGMRLKELVLLNKDDIQVPIDDNGFYILPEDTNEFIDVYLRAETTKGELKDRTTFITYDTLVSLNDMMMNRITKLRKNTHNVYRPVVQRNKAAEEVNREELFTNIKGNRIGKRGVQDIIKKHARECDERIESEGIDCPVNYGKNVSVHILRHTALSHYAEILTVAEVQSIAGHSNSQTTDKYIHIDREQMKQKLKVNSMRFNN

SEQ ID NO: 10752 - protein, 85 aa, Methanobrevibacter gottschalkii
MSNIVYLYNYVLIYIYVFYKEIHFRHIKYFTNRIHSKDNDSMKLFFDNMSKYLIFSLILLYLNELNLIIIISFVLTHINVYAFKN

SEQ ID NO: 10753 - protein, 184 aa, Methanobrevibacter gottschalkii
MSFNIISISLIAVALAMDAFSVSMTKGFTQKNLSKSQILYYGLFFGGFQALMPVLGYFCGNAIASIVETLASIIGFILLLGIGLNMIRESLSSDDEEITDVFSFKEVTLLAIATSIDAFAVGIAIALLKDPILISSIIIGAVAFIFSVSGIFIGKKIGHFVGDKFQILGGVILILIGIKILLGF

SEQ ID NO: 10754 - protein, 114 aa, Methanobrevibacter gottschalkii
MNAKSIFSIFVFFVILIACTNVAFASENIDDSKFSEESDLDEVDSDLDEVDSDLDEVDSDLDDLNDDSDLDDLNDDSDLDEFDDDSDLDEFDDDSDLDEFDDDSDLDEFDDDSD

SEQ ID NO: 10755 - protein, 119 aa, Methanobrevibacter gottschalkii
YTPHRNTKFKKACKLLNIILVHLPPYSPQLNPIEQVWKSIKRITYTTFVETKEELIKLFKKEYYKIINNKSFFNKWVSKYILKSKVFNYKLRTMGLGLSEKYFLDIIISLAMLKCLMKP

SEQ ID NO: 10756 - protein, 64 aa, Methanobrevibacter gottschalkii
MITINPELTKMQKEFEQNLKKMDLNLSDNQIKEKLALSDLVLMFSFVDFCTSFDPSDVVKFYSD

SEQ ID NO: 10757 - protein, 59 aa, Methanobrevibacter gottschalkii
MKQKTNSPVLFNAEEIYKTFFCNGRCLIDLDFPMTFLYFLNNIAQDDDKIILINVNQEK

SEQ ID NO: 10758 - protein, 887 aa, Methanobrevibacter gottschalkii
MAVVMPAYNSAKYIQKALDSIIDQSLDFRDIQIIVVNDASNDSTKSVVEEYIKEYPKNITLINNDENRGPAYSRNVGLQNVNAEFVNFLDSDDCISRNAFEKAYLFLKNNEEIDIASIPIYYFGIKNRPHNLNFKFSKTQVINLDEHPEYIQLSGPSSFFRFEKLKHYRFNENLRVSEDPLLINQMLIDNPNIGFINGAKYYYRQDTLQNSLIATSTSHKSYFTSRVDNYFIGLINYAINKKGYVPRFIQHILMYDLQWIVEIRFIHLLLSQSEIDELYDKIFFILKYIDSDVIYHQLSLPIELKHHLALLKDHGTAYRLNKDNFQEDFNLNTVYIDNYEFLDKDKIYISGVLTNFLRSTDVYAIADGKIYNTNKLNFTQRRNFSLDFDYGYNHSFDVVLPVKPGMKISFKTNASNLLIDYNQTSRLSGTSRYRFSKDYLSIDCRNHIQIIEKTITKGVKLELSVLKQILKEKKQGWRTGILLRILYFMFYFYFRNKHIWIFMDLPNSSGDNGYFLFKKAIKSDKLKNIKKYYVFSKSKNLHETFAEQENKYVASSKFMKARTLSGFITPNEEFERLKKIGNVLQYKSIKHRLYLLFADYIIASHPDNGIIYPFWGNYHHLSGLARSKTIFLQHGVTKDDISYWLNRYDKRIGLIVTVSDLEKESFLNPKYGYDESCIQVLGFPRFDFLKKGEDKKEIVLMPSWRRQHSQLSEDEFIQTDYFKSINELMNNEYLIKFLKSKGYRLIFKPHRNVLKFIDSFDIPDEAELGIEMSYNEIFNHASLMITDYSSVAFDFAYLKKPLIYYHHDDDYHFNLDDSYFKYDTMGFGPVATQIDELKDEIIRLVENDCQMDEKYIKRVDDFFKYTDKNNSKRVIDKILEFDEMFYY

SEQ ID NO: 10759 - protein, 172 aa, Methanobrevibacter gottschalkii
MTLIDIMLKRRSTRTFADEPVTKEELDKILQAALLAPTSMNRKPCNFMVVERSETLRQLANCKDHGANLLENADKAIVVLADTMIADTWCEDSSVALTYMHLMATELGLGSCWVQVHLRSKDKIPAEEVVREILNVDSHYRIVGMLAIGRSDNIPKPHSLDELDKSRIHFLV

SEQ ID NO: 10760 - protein, 131 aa, Methanobrevibacter gottschalkii
MSEKSLIVNHDAIDEDLTEKFINMHDGLPVLLMNILDDFDDGIWIRRYELYLKYPELENLDGKEMEITSELLKEGKIKEAEDFQINYALDFLDKHPQFKQMIDGVHRQGSKDLEILLNSIKEAFIGDFDYF

SEQ ID NO: 10761 - protein, 96 aa, Methanobrevibacter gottschalkii
MHVKDVLDDLDIRVKLPQHWYSTDVSNEFEDAELVRNDEIIKIRVEGEKNTKVIIIDVDDGMSVVSLLPDKKVIGVKYLKNKDDFEYIGKPSELYF

SEQ ID NO: 10762 - protein, 182 aa, Methanobrevibacter gottschalkii
MVDKKAPAEGWPPISGDYIVGDPESPVAVTTLASHIEADLSGAAIAGPCKTENLGIEKVVANVISNPNIRFLILAGAEVQGHITGQSFKALHENGADPDKKKIVGATGAIPFVENVPLEGVERFQQQLEIVDLIDTEDIGNIQSKINECIEKDPGALEEDPIVMEVDEENQKLVIVNDDAED

SEQ ID NO: 10763 - protein, 117 aa, Methanobrevibacter gottschalkii
MNNCQSSSVNWSEKVRILDEKIRREIGLEGESEAKHILIKVQTKSAETIEPAFIVGEDETFLDLFVLSPQESNIISTAVLKNNIQSIGVIGGMSAEKTDASEIPDRPALDDASTLYQ

SEQ ID NO: 10764 - protein, 202 aa, Methanobrevibacter gottschalkii
MKQKLIAKAQELRQHGFTTGEIADELNVSMDTARWLTLQKAEEKTEVPVDFAINWKSIGGNSTRLSYVSGALSDMALSHGEVDTVVGIAVSGVPFATVMADFIEDMTGIDTSIAIFHPNKHRKNQDSSDDEGAISTNFGTVEGKKVVIVDDVITSGKTVREVIHTVKDLGGEPTCVTVLIDKAGLSEIEGIPVESLIKISRL

SEQ ID NO: 10765 - protein, 317 aa, Methanobrevibacter gottschalkii
MRTVNVGVIGVGAMGENHVRVYHKMEEANLVAVSDVSERALKKIEKKYGATGYTEYSELLENPEIEAVSICVPTTFHHAAVMEAIKHGKHILVEKPIAFTLEEAEEMIAAAKEAGVLLATGHVERFNPAVRKAKELIDDGVIGDIVTGFAKRVGPLPPRIKDVGVSIDLAIHDLDILNYLFEEEITQVYGTMNSILDDCDFEDHAEIMVNFDNESTGIIEVNWLTPYKRRELELTGTAGIISVDYIQQSIEVYGKFAQDIEIKHEEPLKSELTSFLNAVVTGSEPEITGEDGLKALKMVIAANRSSKEHKPISFDEL

SEQ ID NO: 10766 - protein, 289 aa, Methanobrevibacter gottschalkii
MIVGTRGSQLALAQTKQVCAWLEKITGEAIDLEIIKTKGDKITTSQLYNMDSKGLFTKELDIALLEEEVDFAVHSFKDLPTELNEDLEIAAVPKRESPNEVLISSKTWAELGPGSKLGTSSLRREAFCNHYEKEFELKPIRGNIETRIDKALNSDLDATIMAEAGLKRLNLTKYIKEVFPIDYITPPAGQGALAIITRKDSDKKEIIQKLNDHISMQEVLAEKMVLEELGVGCQWPIGAIARVNNKEFKLYSILLTKQGEILKKETQKGSIKDAVELGRRIGEHFQNYV

SEQ ID NO: 10767 - protein, 472 aa, Methanobrevibacter gottschalkii
MNHLVIDLTHGGVKIAISLAKKGKNVLAYDIYNTLNDIEAKMLSIYKIDLIQLSDLASFKGDMNIIYPIHMPISFKDIAKHNPDLNYTFQTHHEIICELLEDWGGDFPKVEVTGVKGKTSSVFMLKEILIDENPLILSSLGAMLYEDRKKIMLKQNISIAPANIKETIDLAYKISNPLCKIAGGIAESENPRRYNSAIFESSLGVSGIGDVGVLLNIAEDYPIAKGKSSASKAKRQVFRCGTVVCQKEAYDTYYNDIKHDKVNTFSLSDENSNLYLDDVKYTPDKTKMDIIFSHVETINGNIISGEISMTAFAPGKHNVSNVLGAVLTALSLEIPKDKIINGIENYKGIPGRTNKKQIGNITVIEEINPGINTKSIEESINMICNLNDYLIAVGGDYGITCEEIDEEKVSELLDNVSCNIILTGDVGSSIQKKMSKKCQLIENYNDVYDIALKNNKNLLFIYRSDYRKLKQR

SEQ ID NO: 10768 - protein, 623 aa, Methanobrevibacter gottschalkii
MDAKDKQIATDLAYEIIREVSRVIRPYVGKPESGEKVKIGADGTPTSLIDIIAEDKMINILKNAPVLSYIVSEEIGELKLGRGTKRSIKLTDELRRTDLKEDEIPKFIFLVDPIDGTNNAIKEIPAFGISIAVSSVNQGRLATLNDVELGFISNFANGNFFEAEKGKGCWLNNEEVHPSNIINISDMTLGGFTKSGTSQASKLVDNARRMRVLGSVVLELSYVASGRYDAFLDLRGSRIIDIAASKLILEEAGCIITNKYGQKLNNILSIYEKTIIVAANNIILHKQMIDILNDNQTDFIGKVGIVSRIDQTRPILFAAKIIDYLLTNGREVTIEEGLAHRLTELKENPEIDKIINEVKEKHPEMADSFEDLNLNINFKQLGEKIFDFDCDMAIILGGDGTLLRAQGKMNPEIPLFGINMGTVGFLTEIETPHTFEALNSILKGDYYKEKRSRLVVSHENNQYSVMNEVVVMTNKPAKMMHFEIQVDGEIIEEVRADGLIISTPSGSTAYAMSAGGPIVDPKVAGFVIIPICPYKLGARPFVVSDSSEITVKLLKKGKTAVFVIDGQINEEAAYEEEIKFKKSDKDAYFIRTSTKYFYEKVKDKLSEGGIPKIQGANNESSCH

SEQ ID NO: 10769 - protein, 153 aa, Methanobrevibacter gottschalkii
MKIAIVSGKDEGPSKLNAFDNALTDAGIGDVNLIKVSSMLAGNAEINKLPKLKAGSMVNCVLSEVTSDNPGDEITAVIAVAIGEELGCVVETTGINEDPNELIEEAEMMVNYMMDKRGVKIKGDLIVESSTATVREIASVVASVVYLKDELIE

SEQ ID NO: 10770 - protein, 117 aa, Methanobrevibacter gottschalkii
MILNKYLSMILSACFFMLLMMIVSAVTVVFFNGGSIPYVGIVFVVIFYFMARMFYNYLRNDELYKNNKNYTSDAPDEEYMIKGPRDAKKIFIIFWVIIVLILAAVSLWLYSFNMGSV

SEQ ID NO: 10771 - protein, 132 aa, Methanobrevibacter gottschalkii
MSTKVVEIKTLKVGKYIVLGGEACKIISYTTSSPGKHGAAKARIEAVGVFDNQKRSLVKPVDNKVDIPIIDKRLGQVISIQGANVQLMDMENYDTLDLPMPEDLKDSIVEGIEVEYIVALGNMKIMRIRGSN

SEQ ID NO: 10772 - protein, 288 aa, Methanobrevibacter gottschalkii
MLLNTYEPWKFAFSSENENIKENSFGIIGVPFDSTTSYHSGARSGPIVVREASFGFEKYNTIFNKELNTVFYDFGDVNVVPGNCSKTCRIIEDTVNELSDLKIKPIIIGGEHSASIGAIKALSEKYERLTVIHMDAHRDLAFDFIGEKCSHATVMRRAHELGVNLVQIGIRSSSKDEEDFVKSTYNIQTFKNKDVHKHMDAIEYYLTNIDGPIYISVDMDVIDPAIAPSVGNPTPGGLFVSEMETLLKTLSHKNVVGFDVVETASDRLGDNTAVVAAKLIYDFLTLMD

SEQ ID NO: 10773 - protein, 406 aa, Methanobrevibacter gottschalkii
MNKRTIELSGHIIDSLTLTKTMGIIMDKGGEFDILEIDVGRKKSDISHAKIEVSADSPELLESILDELSVLGAAIDEIKEVNLVASVKDKVAPEGFYSSSNHSTHIFYDGDWIPVEEIEMDCLVVVDEDEKRAFVKPIADVKVGDKIVVGLDGVKVTPPHRSRDEQQVFEFMNSEVSSEKPLMNLIKGIASEMKEIKAKGGKIGIVGGPAIVHTGSGKYLAALVKEGYIDVIMAGNALATHDIESNLFGTSLGIEVETGKIVAHGHTHHMRAINRINRSGSIKNAVEDGTLTGGIMYECIKNDVPYVLAGSIRDDGPLPDVITDTAESQKLMRHYAQEVDMVIMIATMLHSIATGNLLPSRVKSICVDINPSTVTKLSDRGSAQVVGIVTDIGTFLPLLYNALHEE

SEQ ID NO: 10774 - protein, 571 aa, Methanobrevibacter gottschalkii
MEFTAYILDVLTDSAYPARIKIEDGIFKEITPISADCEIELDVEGLLLPGFIDSHIHIESSMLTPAQFAKIAVMHGTTSVVCDPHEIANVCGIEGIEFMIENASQVPFNFYFSAPSCVPATSFETSGAVLDSEDIEFLLKKDEVVALGEMMNFPGVIDGDVEVIEKLELARKYKKPIDGHAPLLSGKELDKYLEQYIITDHECSNFSEAIEKKQKGMKIMVRDGSSAKNMEALFDFSQRIEYLRNQDSFGIIPSEVLERRIHSPIFDFIVSDDKHPNDLIKGHLNKSVKKAAELGVDIIKAIEMVTINPAAHYGLEAGSIVTGAKADFVVIDNLIDFNILKTYVAGRCVFDGEKVLFDAPEVDARNSIKTTKKTEEDFEVYFDGDECEVNVIECYNGELLTSKSGANLKVINGVVKPDIYDDILKISVVERYGKNNMTNAFIKGFGLKKGAIASSVAHDSHNIIVVGYDSAMMAEAVNTIIENKGGFAIASEDFSESLSLPIAGLMSNEDAFVVANKLEVLHKMSQALGCKLDSPFMTMAFMALLVIPSLKISDLGLFDGDSFEFIDVIKN

SEQ ID NO: 10775 - protein, 208 aa, Methanobrevibacter gottschalkii
MKTDLALIGMEKGRQYETIITTKNCENIKNAAPIGVICAGRDKILNRIFKGSQTLENIISQREFIVNITHNPELFTVSTIGKLPQDYFSEDNSLKCADAYFKCEVISLTDAIKQSDPIKKNGAAVVIKSKVTQLMINKPTQAMNRGFGYVIESLADLSRFDMAGEDKKEEYLKKFREANRVVTKVGYREDIKAMGEIKKELIRKGYKP

SEQ ID NO: 10776 - protein, 336 aa, Methanobrevibacter gottschalkii
MNYKMYDEMMEQPESLSKTFKSELSKMEDVSKLVSDADKVYLIGCGSSISTCYSVRDAIRMSSTNINIEVFTGYEFYYNKKLVENENSVAIFTSQSGETADTLASLRRCNDLGIHTVSISNESESSMTKEAITSIITRCETETAILGTKTYITQLACLYQILFAVSDYENKTELLAELRDLPKTLEKLLESTEYENKALAQEFKDEDILYCLGSGPNFGLAYKLAMTMLMEGAIKHACPLYAAEFRHGLIERAEKDVPAIFLKSGIESDEVTDKAIEFSKNLELKYLVYDLDSYAGLDRLLSPFVLVIPLEWFVYYLAHFNGEDPGATRHIGKVRY

SEQ ID NO: 10777 - protein, 193 aa, Methanobrevibacter gottschalkii
MVKSETIDAEFSEKKEKFDEKKEETKERINETKEKFDEKKEKGKNIADNVINDFYKSIDEFKDSIKNMQKTADQRYSEYKKSTVQTIDIDLVETKEMYFIKAAVPGVTKEDVSIEAGDNDLTIETTFKPYIEEFDEEEGAEVIVSAIKSGRCVKTVRFSNSIDIEKITAKFTNGIVKITIPKLIIPKHKVNVE

SEQ ID NO: 10778 - protein, 387 aa, Methanobrevibacter gottschalkii
MKHNPFRKRTGILPSYFTGRENELNELNEIYCSTKRGIPGHLILYGPKGIGKTSLLLKFQDEISNFDDVYSVRIPLMEGNFDDIYTLIIEKCSDALNINIGHFWEKINSLGINIPLIGGISFSREIPKTSPAVAFEKILNVIYDELDSDNPVLILLLDDLQRIIGDDETMKILSILQNALVELNLQGKNIMFVATGSEDIFYKIQDKLDSAVRIFEPYLIGPLSYDELCEAINVPNKKQNVSFEEDVLKEIYYLSNGIPYYMQILAYSCFEEINADNKVTMTEFKKASVHSLNILAQREFKVLFSKSTTEERKILCLMAESDKTVLSYSYIKDNANLNSEPSALLKNLINKNMIIKPSRGKYKLKNNLFKLYLQNLRINQDTGLINE

SEQ ID NO: 10779 - protein, 342 aa, Methanobrevibacter gottschalkii
MMIPTIPTPQELLDKGFSRGKKQADLLRGQKIPKHLKGKRIEERRVVTSCQVIKDKLKSILDAVPEIESLHPFYQDYIDITVGVDDMKQALGALNWAYGIITQLEKEYGSKIRKNPSERATAIQKQAYGRIASVVNKIKKDLDFLDFAKQNLRNMPTIDFDATTIVIAGFPNVGKSTLLRQITGADPQVANYPFTTKGIQIGHTERHWKNIQIIDTPGLLDRPVLEMNDIEMNAIVALEHLADAILFIFDGSETCGFHLDNQYNLLKQIEKIFSEIPVIYLFNKMDLVEDAEYLKEYIDDEENSIFISAIEGEGIDKINAKIDRIKKIDRTPAEEEDEEGYY

SEQ ID NO: 10780 - protein, 1171 aa, Methanobrevibacter gottschalkii
MLKLESIESSIFEELSNSIIYFQYGINIISTGLNREGKPIKCPIDAIGTIKNDDKTEFVFIEATTTQVNSLKDKWLSKSDDKPGDIIKTYKKAKEFFNLNKNSSFKLFLMTNRDLSGDKGLDLITEVENENFDIPLKIEIMEQGSIKQFLDYDSDGQYLRKKFLQIDVERLSKPLLHKICDENLQAYENFINTTGFNNLIEREELPSIEKHISNNNLSFLIGESGYGKSVISFQILKRHINNGGYGLWISEEFLKNSSNLNYTLDELLHQYCPKLEKNSGFKALNFNSNDNFLLIFDDLNRSENPKKLIDKIINWSKNIKSGKENTDENYHDKIRLICPIWQKNMKNYGSNLDNDSNIIIEKLKDEDGIKILKNTAKDKGIVLSDLEVKNYLKKLDNDPFYIGLFISELNKFKNWDDLINNAFQIFLNRKFEELDEEEFLPQDYERILLKLSQNMLENYILTPNLLEIDSWFVSDRDKKILRILIKDRKICYLNNNQNLYFIHDRIKFYYLISACTKIINDNPQSEIFKEPFYAEIIGASLYNIGKNKKFIEFLANNNLLALFASIKYIDDANENYEQILGILTEWSNEKHESYPSFQEEVVKTLYTYDSELVVTLLGNINSLFTSIPCFRNGSTIHGIKKALNIFGYNYPLFKQTIEHVKIHYKSKIIEDIKRILSSDKLDDDLLCGTFLLAGYLGFEELEEIIKSSVKLFEIKEDNLYIILFAAFRCINNDMDFIKNLLEKWDMFGKKDDEIRFPFIEELRLTFRDYPVTDNVLNYLGFNFQEFSNIKHSIWYICSELNKPLSFKMTLDYLSDNEYLFDILPFFRRIQISSESRIFLENYYKKEDIKGHSKKYAFRLWAMNCNENDLPKLQKIDKDNILFSESLITRIRLGDLTALNSFIKNFDENVVLNEIHNVWNDEAKLFVEKCFKDMELNENKEIQDGYDYVHLMQCLAKIPLEDAEYYIKQYWDKIKYYRIFIQLNFYLCTNLSIGLNNELFVEIKPDETLFEHFTINFLYMEGYDKFSTESHFNEIIQYLVYFKNSDLDLIFRKAEELGYCRWIRKACRNLDKNQFSKYCKTDKNIVSDMELYDNYSFWQINFENNCLNKNRINNILRLYLNNNQNIESFINVAKFIKENGNRDDLKILFESNIKEDNMLYDVEFSVKCRTLD

SEQ ID NO: 10781 - protein, 436 aa, Methanobrevibacter gottschalkii
MIIMGITDYIKTRLLNNRVEQYNTKRSYCGEDERQPRTDGINTGLDLPDALPPVINKTITNARYAVKLDGYTSGILKNRIDKANVNMVLVDKENKLSQEQKLTLILWARKIDISQVAKNILQGGMVDGEGLIKPVQRWDKSIGKYIKPVFLEIGAHGYGLKKEFNDDNEVQLYLHEMPKDIVNGSPEEFDNYVSVEEGTLTVKYEPEEVINFMYNEIYCEAQSIILNCLDDIYHKCNLERNQVERINKDNIIEVKPAMDANGQPYITELSSTAKENLYADYGTTAGSNVAIVPPGIESKILGGNNYQSDYTRQTEIFRNNILRTFVTPQSQAGNEKSNQNVAEYINDSAITGFIVNVANDQKWVLKYCNQLLNLQLELMGISETLDIYFSYSRDDVLRYIMELSSEGDEIYKNYLSNFEEEQPVGERILSENGVEV

SEQ ID NO: 10782 - protein, 632 aa, Methanobrevibacter gottschalkii
MKEKMGIYQRYNLGPQHYHSYFEFDFKNKKAQLISQDITEDFRKDNALIYTDDSNLKIANSLLIAEENKIFDLNEDDCQKLYSEFDKIKYSHDEEIPGIWQLSNITFSEKNFYDDAPEIFKIHESNYQYVNNYPKNWIPLGNLIIDLLGFDLLNINLNNLITPLYYNITSEGVYEKQTNNKLNLKKLNFNIVSFEEPFNPFNFSIDSEDSDFEKIIELLEDYGVYKWYDKDYAENIIESDDFNDFKGNSWFIELIFENGRVLNLRGDNAYPDTYIHLGNEILNFKEDLLRINEIDKEQQNFIKSFGENKLAKKRNIIKKIEISQTILLDDRKHYEFTLDCENSVIIPYDNYDLYEPREHISRDLSKKNYSVSKLFYENIVKEEIKLDEQKLDNFLNEINELKFIDEKPHMWFYDKNYYQNLITIHTPMGEKSYNLTNNYELWKKLGSLFEELLGFDVLNIKNFKNIINPFDYDICNDGVYDKETGDKLSLEYIEYGHEAVLHFGIGYNIYVDLLKGTTSGLIEKDDLSNDEIEKIVSLLEKNRVYEWVFDEFWNKAIYHKWCGFDGYNWYLSLVFEGNKVLNIGDGNDYPDTFVNLAEEVIEFSGKDILKLKTVYEDDIKIYKKYAELHLNG

SEQ ID NO: 10783 - protein, 317 aa, Methanobrevibacter gottschalkii
MQCYNCNGIYNDYLSYCPYCGIEKVEFNVCSNCEEKLTKDILVCPKCGGKPIEETNEMKSDRLNREGLMHGMTSSPSDYFNEAIKFNKYNIDAWVNKSEFLNDRTMHKAKKCCDAGLKINKDNMKLLLSKSKALKKDERRSDENNAEIILNNLLKRCNQELQENELNEEIWILKGEVLNELDKKEDAIECYSKALEINPKNEELWIRKAFLCYLNNDYYCEIESYKKAIELNPTNEKYYEKIGDVYHLYIHDNEKAIEYYNKSLELNPDNKQLWDTKGRLEKEIGKYEEALKSFTVDAELNPIMMEHYYLKQKYFVN

SEQ ID NO: 10784 - protein, 78 aa, Methanobrevibacter gottschalkii
MMRHELFEVGSYDYSDLDDRLDKPVIWSEDDLKLIAENYRGGIPLTSEHDNIYVGIGNNIEYEKGKLFIEVPDELDME

SEQ ID NO: 10785 - protein, 220 aa, Methanobrevibacter gottschalkii
MSLIDVGVTKNPRKITLLNSEITGNTGATGNPNPAPQGQPQPAPSKDANVATSLLLEKLQGKDVEIGKLQDEINNLKEESKKYDEIKKAIEENKEFIDSKDDILKELSELRKAENERKIKEYEAKYNFNYNENAQDKEIIDKLLSGDVDMELMEKLAERRIKIEASNDGSTPGGRNPSNSGDVGETGETGSTGNEDAPSFTTREEYNKILKDMGFNRTRI

SEQ ID NO: 10786 - protein, 652 aa, Methanobrevibacter gottschalkii
MVSNNIFISPIEFKDWENWKNKINNSNDNEELCHIAETDREWYIRALAVNKINDESILADIAINNSNSYICRLAVSKVQNDELLKEIVDKSPIYEVWEDALSQIDDEYILMDFAENGRDFHIKWHAIKKIKNENLLVNFVKKRLKHTRKDFIDKSKSFDESREYSLCTIAVENIHDESLLKEIVINDYNQAMGIEALKNIHNQEFLIDVALNNYDVHYKLSAIRNITNDDVLIDIAKNHPQRFVREKAIEKISNQAIATDIIANDHEIEVDKLDIQHIDDSLLFNLVKKDNNWLRRTYFVKAIQNTDYLKEVVCNDVDSHVCKAAVEKIHDESFLKDLVNRDFSSEAFAWDVIPAALKNIHDDSFLKDIVNNTKYGRYALKNITDESFLIQIALNCRDSHCRSEALENIYDESILTQIALTDPQMHVRRKAVSKISNDFALINISIMDPGFQEYDRPYCVIYLVRQEAESRLKVLLENPDIKTNTEYVDVIQRIRYELDEKRKTSTQKGIIHIPYNEMKDFTQNKTIIKEKNKKRKITKNKRDEKSNLEVEINKLLENYKNDVLITIISFNNKSLFKKGSIFNIVKEPDNPYDMEAIAVKSDNITIAYVANSVRTVVKGTMSAGRIYDKFGEDCEIEVIFVRDQIIAKLIFD

SEQ ID NO: 10787 - protein, 90 aa, Methanobrevibacter gottschalkii
MIIHFTRQNHYVIKIIGKLSYYINDSQDEKGIKIEKLKNKMRNYGLNDLEFDALINKLIDIGYLNKSNECNISLCEDNYYSLYDVLTLHK

SEQ ID NO: 10788 - protein, 338 aa, Methanobrevibacter gottschalkii
MLNIINKNQEIKEEFFYLERKALRFYKRKKYKQSFEYYKKVLKASNEFKNNSNESHFKWYDEILSNCLKKYSDNYDEFFKCIYSMNIENYDAWFDKAKLYGNNNKRNEAIIYCYKLLKIRPDDLDLLEFTGHNLCFSHRYDESLKIYDIALSIDKNNKDLIQDKWYVYYTSDRIYDTLEFCKNLENTDDITSTDYQALGFRFEEKEEYETALWCYKKGFEIEETDHKEFDTDSVDAIKRMLLKLSIDDYSYINEFYLEWISKIEHKFETTNCSKCGGKLTPIIYGLVVGDEVFEEQEKGNIIVGGCSVDESSPTHYCKKCDEEFNFRFNGLKIDYPFY

SEQ ID NO: 10789 - protein, 555 aa, Methanobrevibacter gottschalkii
MTLQKKLQINIVMSNYNQRSSSYSSGHDYIFLDNLASSSYSNYFRSDLKNLKIKTSNGTECQVVYIPSYGSQGAAILARVSVGQISQNTKLLLDVHDTGTAFASTLSTGNEVLMFDANNDTYSQFFMNYSGLSSNNDSTDGGQFLRARFVPNLEGTSPTDLFTTFASGQPLANNRVVVARFKYINGNVFVNDNATYHGSTIGGIMMQIDGTLSPDESNVKATVNYWGGEKDYCMFTGAKTLVLASSFDAYNQGSDEEGNWKQYHFHNRVGTGTSNTSDYIEGFSRNNPTKIYLGCFKMIIDYDVNSTIGHGRGYPTGLEHTEKMDVIACLLDEGERTYVNDEHTAWICSNQCAVGDMVTLDMSSTMEHTIVRKAQAGELAFGYLLGKVQVKTSGLTLVAVAVLGDVFRLKLKRPVAEDILPNTRIYIDSAGECNPVEGHDLRLLSIVNLQNNEDTDYIRVYRQMSEVEMYRESQNCIDLGDCSFEQDEITHVVNMIVPSESNIMAQANYVKDADGVTYCELPDVAIVNNVRFVWEDNKLYMEWEGCDDGQNVYFI

SEQ ID NO: 10790 - protein, 63 aa, Methanobrevibacter gottschalkii
MTIRKLVGTLENKGPYIDQSTGHWFYWNGTRYVDSGYPYAVKLIIEFKIENGILYYSITWEAQ

SEQ ID NO: 10791 - protein, 49 aa, Methanobrevibacter gottschalkii
MKYIKYFETIEEYESWMKVEENAEEVYQSEEKILVDGVIISHTYKEEEI

SEQ ID NO: 10792 - protein, 83 aa, Methanobrevibacter gottschalkii
MIYEFLEANRKDIDILTSFLVTAIPIVMLYSEALGITENTIPYCILMIILGIASHYASRIRGEGDVEDAKQKAKRVLGFPEEK

SEQ ID NO: 10793 - protein, 89 aa, Methanobrevibacter gottschalkii
MNKIKKKIFICNFTKTISSAVLTAVAINIIMTNATKYALIEGLLPFTLAIVIVGLIDLYEYRCEREDKINLDELEERIEKLEGNVDGER

SEQ ID NO: 10794 - protein, 118 aa, Methanobrevibacter gottschalkii
MWMEKGKILIAVPTFENIKPQCFKSIYGLTNPKDFNLYFDYVKGYDCARARNEIAKLAIKHDFDYVLMVDSDVSVQKDALVKLLECETDIALGWYFKKRTRTDESVIFDFGKDYSNQR

SEQ ID NO: 10795 - protein, 200 aa, Methanobrevibacter gottschalkii
MMKFMITITINNIENKELKSKLKKIINNDELLLENILNTINKEKNYNKLLLTFKNLSEKNNTIKKLYERLEKNPLSFKTKSKSVLENLQKGMLLAFFSDNELKHELILEKPIAVILDNYSVHHAIFFTELCKILNMDLIHLPPYSPKYNPIEQVWRTIKAKISRKYISSIAQLKYLFKTEFKKVVDNSSFWKNWEENFLQ

SEQ ID NO: 10796 - protein, 162 aa, Methanobrevibacter gottschalkii
MSNQKLIKEYLGIISEIQAEIKKLENDTRVLNKLYVILDVLHDEPIPYIVEKHGISQGTVYNWIREWNEGGMEGLKRKKGSKGQSKLTDEQLILLDEIIQEENLQTAREVKDKIEKEFEVKYSIRSIERIMKKLGYSYTKPYKIYAKMPADAEEQLKKTLDI

SEQ ID NO: 10797 - protein, 127 aa, Methanobrevibacter gottschalkii
MFKTTYVSNFGEINHILNYCYEELEWGELIKLSNELLDIEKNHQNNRRSDNIQYSVILIAIVTLCSQLLIYYSNFKDVILFIGGIAFLFFLSLIFKEKIYYVWQILKLVPKFIYNLIVLLLKRIKDL

SEQ ID NO: 10798 - protein, 330 aa, Methanobrevibacter gottschalkii
MIEGHYTQKLTNGECPYELVYFEVDLLRNIIDNPRYVISNNSFKYNISITEKYDNDETLDEKFKFILDNVGLGFDENNERIFAVLLKELSELHPEMQKRFSVYEVKKKSYVDPSYIKSMNDGEWPDPSVFSAILYQIEQLNNLCSDNEIKLFKSNYKKKPPIEFNILVLSTKKEYDNFIKIFDIMLSDNINKKFFEGKLDLIEFTNKDGTKKKDKGTITLFKEWLGEIGVSPATIKKTIKIINKVRSERSKPSHNIRDNEFDIKYLQKQNKIVLEVYNTFRLLIDELSRINQIKVKHSKWYVENRIAIQSLDEIKNEDNENYQLKICQSK

SEQ ID NO: 10799 - protein, 189 aa, Methanobrevibacter gottschalkii
MDLNFISIILDIILTIVTGFMAFATYKMARSTNESVEEMKKTRVEANSAEVIMYFKVENNRMYLIVENIGNTVAKDISIEVEPELKDSHNKDYEHLKEISFLPPNYQIKAFFDMGFNYLKNEDNPVKYKFIITFTNIYNTKITREYISDLSYIKSVSYLTSESDSIEMSLTKIKDELKNTNDYLKKLNN

SEQ ID NO: 10800 - protein, 54 aa, Methanobrevibacter gottschalkii
MKINEETKVRNQGEISLITTIPKTYVKALNIKSGDILEWILDTEKETLELKIIK

SEQ ID NO: 10801 - protein, 333 aa, Methanobrevibacter gottschalkii
MIKVIELCAGAGGLALGFEKAGLEHEVLVEIDKDCVATLNKNRPDWNVLHADIKEVDFTQYHPDIVVAGLPCQPFSYAGKKLGFDDTRGTLFFDYARCIKETNPKMCIIENVEGLVRHDKGRTMETIVNVLENELGYDVQYKVLNAVDYGVAQKRKRMFLVGTKKGIIFNYPKKVKGNPVLRDALKDVPESEGTEYSDKKKEVLELVPPGGCWVDLPEDVQKEYMGKSFYSGGGKRGMARRISWDEPCLTLTTSPCQKQTERCHPEEVRPFTVREYARIQSFPDDWEFEGGITSKYKQIGNAVPVKVAEAVGKEVIKALNGENKRKEGQTTLF

SEQ ID NO: 10802 - protein, 242 aa, Methanobrevibacter gottschalkii
MNKYVTFVSDEIFLEEVKKVVDAYATDEDLSKTPWEVLSNSRETIDQFKTLFDIYSNRFSLSEWINFEIPRQHDKTASNRVGDFHQNLLGRVDGWVNLGRGHPSGMDLKKEDDTIWIELKNKYNTMNSSSLRDTRFKCEELAEKYPNAKIYWAYIVSQNYESFDKTWVYRDNKENVVHEINDNIRNIAGKDVYTLVTGDETAFEQLFDALPNAINDIKKSKHILTPKDQVVFEKYKQLIFKD

SEQ ID NO: 10803 - protein, 164 aa, Methanobrevibacter gottschalkii
MADSIILLEERKEVTTFLLDEGTITATTVTTPTGETPGYEYAGTKIKVDDVVTLSVNSDIGKPTVKKFTGAEGEIILGIAVNDPVTMTGGKRKTAILVLGHLFRLKLASGISNIAVNNRIALTSTGAIKSDEGEYIAMHPVTSSDDYKYIEVFRPYDIGTTGST

SEQ ID NO: 10804 - protein, 312 aa, Methanobrevibacter gottschalkii
MITKGNDTKVQNEVIAQTITDETAKRLKLARLFPKQEIKENSDYYTYFRQNINLDEAIKKGLLGEAKDIAPGASLQELNIRKPVTDTISIDTVGGVLNVNKDVFDSDIVSFEDLLGDVATVIANRIEYNIYDTLISSPNVPQYNTTQTDDTMDAFGNFVIKAQEAFKGNAGAGADLTIMAESYKTLSYVKQLAYSSNKLVQPVEDIKEYYGIDNIDLLGTTQADGGSLIGEKQYIGFDLRNAPLTVLYSKSSGTTVAPITSDENIADFYPIIEIMRKDIYDELPQYTKLFIQSKVGILLNKPGLALKGTCRP

SEQ ID NO: 10805 - protein, 308 aa, Methanobrevibacter gottschalkii
MLTKGNDAKVQNEVMAQIVADTSAKWMKFTRLLPKQEIEENSQYYTYMSQRVNIEEAIQSGVLGEAKDIAPGATLQELNVRKPISETISIDTIGGVLNVSAQMLDSNLISVNDMLQDVGILIGRSIEKAAIDMIMNSSKVATYNFESGDDTGMTILKAQEKFKESAGSYANLNSMAVSYKSLTTLKSDIFSSNRQVEPVELIKSYYGVDNIDILGTAVCDGGSEMGDKTYIGMDYINPGMKLLYSRTTGTTVAPLGPDGEMYDFYPLIEFMRKDIRDELPMYTKLFILSSVGVLMNAPNRIIKGNFRA

SEQ ID NO: 10806 - protein, 138 aa, Methanobrevibacter gottschalkii
MKLILDTENSHPTTITVKGKEITLLLIESSILIDSSQIAKIFDKKEKTVVTKVLKSKLEKYETENVKLLKNYGLMHPDAVKPRPFYDLRQMLEGPAYYYFKKEDEVDIIKVIIRVAIGKHREWIHNRCIDKFRVGCVR

SEQ ID NO: 10807 - protein, 545 aa, Methanobrevibacter gottschalkii
MLGIKEFLKPSVLGYYKRCEVTQISFYKDNHEEESNLLTLFIFDEENFQGRNEIFLTGKKNKINSKYKLCIKRFYLSIEESIELFNCLNQGVSKTSSLKKYIFNDNPLKLLPQQFITTNEDIRFNKILKNNFHSGSYIFEFFDEEKDFELLFGLNKSGRLKKISKMIGEVVPIDLLSCTDCLGNYIFQLPITILNVHTNKNKNILGIDFYWHNNLINEVKPNCLINIYSKVDNNYLFDIFEEYNKENHQKINILPSGKNYVLKIWNNDLKILLYEMNSKYFEKFRVSLSMSECERKFIEDNGESEVTIMSNPKLSDDISYLNYRNDAMYKKNLKELEDNLKFNTYMQNENALEDIKTLINEYGKNGVNIIDPYLEPNDLIRTVVHLKFYDAPIKAITSLKNSFNELLIMKEMLEQLPNQNIVQNFKNVLNEKIEKEKKSNLECIEDYKKELDEKIINSCGLNLVFRAQFDRYGQPFHDRFLIFPGDDEKLLEPIVFSLGTSLNAFGKHFHILQEVSHPQHVADVFDKLWGILEQKEECLIWNSKE

SEQ ID NO: 10808 - protein, 506 aa, Methanobrevibacter gottschalkii
MGDIRTKRGVSDLEFKGIIDNFDEFNMILVNEELILLFESLHDFSFDELMYFEDPLHYENIGVQKIMSQIDEIISVLFYNIDIKTTDDVISIVKSDILLFKRAMDQIDLKYFIFFSYLNSYLNVDVDYLINHFNYELNMIKMEEKINELFNQIQVFPKPNDNNLSPLLKNVLFKSLKKDDIMHSSLKLLNISKDPFIFYNFKIYCPKLLTSMLILIKKINYDFFLRNMFDVNNLIMAVLFCKELDISEILECYYENDISNIDLLFTFLKKSIDSNELIDDNIVFIKDILLDILELNENLFRKIIRLFKHKKLFNRSIGLLLSGINKWEVELIVNEFDLNFGANNHLINLRENILINLDKKSDNFKLVLKLVYKNWDLNLNSLIDDDENGWDLLCSDFNSFILEYYNQFYDDDMLVEEMKLNFNFLEKINSTWSSNFTNYKNRIHVYYTKLYLLSSIYKKRNINNIEILGCYENFFKNKYLIEVLLRDKAKKSIIDFKKDYNMMKIQ

SEQ ID NO: 10809 - protein, 495 aa, Methanobrevibacter gottschalkii
MFKEGINTIIIESYDELACIIKGKHEKNKMDLREDFIFWGLSNIEYELIPSALRRNKLNQLEINELIESDHIFKVSIDENDAKMFNLEYSESINDGEVIIGVDKYGNLIHDVKSDYKVLECDLQRERENYLLLKFFNCADKSGLKVKSEGFLRELIHNYSSKRLEEYWLDFDILETISLAQHYGLPTKALDWSYDYKVSLYFAVKDVIESNLSSDGVLWALNYKLIENHNFNEEYYVNLHIHRPEYNTNPNLNAQKGLFTFLERYVGDYDKPLNKIISDELNKTLDQMPWDNLYESKIRTIPDDISKNDTIFYKFIIPKEIKQNILNELYLEGYSEEYLFPGYKGVCESVINRVKLNEILKNNDEHIKKSILLSVDWNLNEIINKNQLYVFVNLDFKEEIDKIFIYHNNDVVGYFRGNEIIKDSLNVLWEQFGEHSGLSEDKFDECFKGNDESFAIRINDLNIFKHSIKLCDFELENDFCFVEDNEDLKFLLNFN

SEQ ID NO: 10810 - protein, 272 aa, Methanobrevibacter gottschalkii
MSDNKNNNISWTSFCQAMNSIAYWLLQNKKKYKKRDHYQILTLKGSCSDIEKKAKKLGNDKLVSMYTMALIKDNTSLDFLPNYVTLKNGEQIDKAEYVDMAIRTEAYIRANKRLPAIVYRMSTLPDYKDSTMKLFINVFNFKGNTIDEALAIISKMKLYSKYFDSQKTDKKTINDASLGKGSNCVDWGQVYYRIAKSLGYDVQFVHVKCRVSGTGHIKLRLKHKKHTGGNWINRDPAAVADTTSGNVKSIWCEDGYLIAYDPSWIFTDLYSS

SEQ ID NO: 10811 - protein, 262 aa, Methanobrevibacter gottschalkii
MGAFEDYRKRIRKEIPDSTEYFNYFFNNDYDNAIKVVKRDMDKYNQKYGIVPLELERRLEDAKMMKYSNIYYKNNEKAEELEKEGKIDEAIEVLESNILIHTDTPFTYYHLSSIYQDRNEIDNSIRVLKHGIKNCRKIPNKSHVNSLKRDLEKAKKIKKETKSQRLPSANEEHKQRDKEADDLLKQGKQDEAIKLYEINLNERTISNNSYSKLFKIYFDSEKYDDAQRVCEQAIEIYKPINAAKVSQYRQYLSKVYNKKEDL

SEQ ID NO: 10812 - protein, 65 aa, Methanobrevibacter gottschalkii
MANINNTSSYMDEDKKQIIKESNYTFRDALEVSSYLIEVGKFERFYKEMQIHDLQKELDEMDDGE

SEQ ID NO: 10813 - protein, 82 aa, Methanobrevibacter gottschalkii
MLLEKTNISARVDITLKKIVEDSTFTHKDAYELGAKLIAMGNAEETIVLINTNPDFERIMKQTEYSLIEARKLELERELRVL

SEQ ID NO: 10814 - protein, 270 aa, Methanobrevibacter gottschalkii
MGRGNSDIIYFLEQHEQEIINCCKKGMSNNEVIELLKTKYGRDVADITYRKFKAGLNLTKSDFLETLLDEIMVMKTSGATDANVRRWLEEEHEIEVSRSTFSRFKKKYHITDKEKDPRARDKDSLTNRAITQGQIIDNEVHTDNIDLAIDTILQQQVTDIKTGLDNLDKITKNAVGIEIDFAKLDQEVRYNANEKSLARYLIDLTELKIRYLELSVKAFEAKNRLFKDEMDRLFKNRVLELEDKKIEISQKDIMNEIEILAKQIDDNNVQ

SEQ ID NO: 10815 - protein, 472 aa, Methanobrevibacter gottschalkii
MITMYNENNEFYLDARDKVILQKCVYENPYIPFSPFPKQAEMILAREKEVLIGGAAGDSKSTSLLMRALFYVQDDMNEYHALILRRTLSDLKRKGALIHKASQWLNRKEIQNNASIKPKWDGTEHSWTFPNGNSLTFGYLRNINDLDTYQGSEYQFIGIDELTQLERFKYIYMRSRVRKTKDNKLPTQLMASSNPGKRGNKWVRERFIEKIDTDIQDKSQIRFISSSYLDNIYLDRNDYEEYLMGLDRVTREQLMNGNWYASVKGQLFDESDFHIISQDECLKIPIVRVIRYWDLATTEVLNDDKLRGSDPDYTAGVLLAKDLNGNIYIWDSYEFQLESRNLINEILNTAARDKSDVQYIELDGSTGKNFGLLIIDELNRRGFTTGTGNSRENKVDRARRVSADIQKNGIFLVGKDRTGFTKKWAMEFLEKITAYPNEAIHDDCVVAFTGGYEKIVAEKQSQRVNVDKWYST

SEQ ID NO: 10816 - protein, 88 aa, Methanobrevibacter gottschalkii
MTDRSAEISKINDENQEEDEELFNSLDEIISQNIDEIDGVVISFPEKINSKNGIAHTARAFMWICDLALKSILDEKYSQPVWILMNNL

SEQ ID NO: 10817 - protein, 592 aa, Methanobrevibacter gottschalkii
MKNAPKNWSLAEPSEDYGNDYFVKVFDKDTDEATKISFIIQLKGTEDYKKDEKHVKFSIRTDYLKYYYSKVDMPVFLVVVDTINEEYCWLFVQKYINEELNVEKPNWHSQETVTLYIPIENDFSNPKIIEQTAEKGSQYCNILVNGTPTQELIWKVKNIIDNPLEKSKDLKKQYSEIFNAETKVGFEFIHNQNNPQNAKKHFRSVYDKTKDDNDYVLAHLNSIIGLTPFLDCQNKIEAEKLFEYIKEGETLSKKNNIKYLEHYFYGLRLEKLCFILQSQLRDLLVTQKISNLGKTILSFVVDPETTEGIKEIFEILHKLYADFCKNLIETLDDKDLFIFLELLRMLIGMQLHHIEAVFTSTDDNTKKALFNQMDQLLSIFRDLINFTSEFDIFRYDLLSFETTYLYLIGDKQYNETVDEYINFAKENKSQYHLKRAESLKEKLSKPLNRQKDISEMSDEEIHDLFKTLILIIEKIDIDVDETDEAMVLRCAVRDLNPKRVLDNCKHLELHYGHGGQYAKFFGLASDGLKTIYCEHGGIITNRNLDNTYEEFYNKYCKECEHKIKQDFKWNPDKLSYVKSKKFKEILDKNPFI

SEQ ID NO: 10818 - protein, 115 aa, Methanobrevibacter gottschalkii
MTNIEINAETKNKLEAIGKILSPYLDIGYDDFDEIIGILINNFNNHKLKAEYDEKENIIKIGYENSKIYSIPILIFELKKGCYEKIGIWMQKNNFIPEINTDVTEYIKKCEDTFL

SEQ ID NO: 10819 - protein, 218 aa, Methanobrevibacter gottschalkii
MKGYVGPEFKKDAFNCPYCEVYAHQKWRYRLMIFNSNGEHPADPIYDQLGVRGWSTSKCDHCGEISFWHDEQLIYPKSSIAPLPNDDMPNDVKEDYIEARNIVNDSPRGACALLRLALQKLMPHLGESGKNLNEDIGNLVKKGISSEVQKAFDSVRVIGNNAVHPGELDLKDDVQTAISLFRLINYIVDNQISSKKEIDGIFEGLPQINIEAIKRRDK

SEQ ID NO: 10820 - protein, 328 aa, Methanobrevibacter gottschalkii
MEYKLKKYFIHDVLTPWMHLEDIYLNENHPAHEDLKYDLDAIKEQEVLTYYKKHEERINFLNRKIKNKIIYSKILLFGELLANSIFEDRLEALLKNEPYDRKEFENFYDKENLIKVDKFSKVYDSIIINGNRYGLCLPINAFNSSYWISQELNKLNLDDVDLKIRVDPFLKNFSLICQKSTVFSKPLNWNKIRDLKTVDKGQFRNYKTGELTEYMWKPRKNNRVVFTCEELPSEDLINLRGSRYFHAIFEKDSGRFIHCDGSIKIYNKNSFKKRCKYTINNNEINDIGKEVKIFRVDKNIPKEMFMSLINSYFYWNYDLIDYFLKKTI

SEQ ID NO: 10821 - protein, 138 aa, Methanobrevibacter gottschalkii
MFRCGCYPNHEICKNKNTCEFWIPLNQKLKQLNQQISYELKILESLNQRKRDYFRILSEIQQGRYTEIVAIDGRLKRVPKKNARGESILKPDDVQVGLNFNVISKEITDTETIIHELRIREKNILKILKKQYWTIACK

SEQ ID NO: 10822 - protein, 212 aa, Methanobrevibacter gottschalkii
MDSPKDCLFHHLKYLADFVVNEINEDIELLRLPWQELSNQLIKRAYAQCERECPDWLLTFAESVTPEDLDDEEIEYLRMFFIDEINKHNKSIKVYSAEDGYPIKYHDYFTDSVKDSNDFYERVFNIINERLVPYMVLHHGRDGLDYVCFTSGLKKALKNANEVCYDVKGIAELLGWEYKSVKIPKSTKVMVVRFDKFLTFLYPNLSEKEVNK

SEQ ID NO: 10823 - protein, 226 aa, Methanobrevibacter gottschalkii
MSEGSSAIQIKKAIGNVYKPDYEFTYFKNIISAFYLQGTDPEVVEKILTELYNQLPSHEKTLDEIIKLFEDIYLGDENPNSGIKGIERFISDKYDKKTSILVGRELNRAIIPYDTNKIYKLQTGSNKYIVMDYRNNEVTTQTIEWKKGNEVADYTRVLFCYPMRITIHDNPISEAGITFSIEWRTTDGGHFHTKDMNIVEIEHYLIEHGYVLSRYQSKDVVPGLIQ

SEQ ID NO: 10824 - protein, 166 aa, Methanobrevibacter gottschalkii
MSFENSKQTIFTGTQLDYEEIVEIPEGYEKAELKDFEDGTLIRGRPEMASVSSFTFDDDGEEKTVNRFKLYIFQDADKIYVEINVNLKNDGDIHKNVRKGSVLFDFLTSILELENAGSVGKSNILRNVDLSEYREFVNRLSEMTIQVKERSGTYTFYSFIVRDVQV

SEQ ID NO: 10825 - protein, 182 aa, Methanobrevibacter gottschalkii
MVKAELIENPQETEIVKVDTVPDVDVAIEQWDAYQRLCKGLLNDNDYQEIIVKEKDENGNYVKVKRHFKKKSAWQKLSRAFNVDTEIVDRDIERTKMGRVREAYYCVRASLPNGRSVESDALCSRSEKGKDKVSDHTIMSTAKTRATNRAIAELIGAGEVSAEEMSAEKIAGQSKFLKEDNS

SEQ ID NO: 10826 - protein, 99 aa, Methanobrevibacter gottschalkii
MDSYLPDCGIEHNQFEDNYHGILTHSGEIKVAKGDVEQEILYIDDDGIVLVDGGKKAYQTLIHTKLLALIQYAKAGDIGLIKFIRGEAFIVGFRKKRSD

SEQ ID NO: 10827 - protein, 34 aa, Methanobrevibacter gottschalkii
MLEQEVNGKTHVLVPKDIWDDIMAMFNEHLNKGE

SEQ ID NO: 10828 - protein, 52 aa, Methanobrevibacter gottschalkii
MCEVIKPRMNEIIIFNNFRALEEVIAEIQETENIRNEREFFQSYKIKIMKLD

SEQ ID NO: 10829 - protein, 345 aa, Methanobrevibacter gottschalkii
MKKYCEFNGMSLQELLDEAEKEEADNVKWKHRRVKTKLLKYRQFLLDNYSINTVRIHMSAVSKFYRFYDIEINPLPRLNMKAVKKPTSIYYKDLPDKEIIREALAISPPVMKAIILFSCSSGCARAETLSLTIQDYIDALSEYLPNKRMDIYQIIDYLNDNDNVIPTFNLRRIKTNKYYTTYCSPEAVKAINAYILTRTDNVTPESQLFKMYESYFIGYFQRINDELGLGRVGHYSRFRSHMLRKFHASALYNDGMSLDNVNDLQGKAKNKTDQAYFMINPDDLKYEYIKHLPAITINTDVEKLSIKSPEYMQMEKENNEYKQKVERMEANIANIMERLGQEEAK

SEQ ID NO: 10830 - protein, 185 aa, Methanobrevibacter gottschalkii
MISDKAGQYLVKLAGNAIRQYLETGEKIKKSEDYPIELDEKLGVFVTLNKNSNLRGCIGYAEPIMSAIEATIDVAIAAAVNDPRFPQVSLDELETLDLEVTVLTKPELIPVAHYNQYFDEIEIGRDGLIIQKGYSRGLLLPQVATENRFSVEDFLEHTCMKAGISTDSWMDESCDVYKFQGQIFK

SEQ ID NO: 10831 - protein, 464 aa, Methanobrevibacter gottschalkii
MINLLSDKMEEYIDLFEKVIAKTSSQIDYIDIRAGIGDNTSILMKDGNVDEINTGMSLAARVRVLNNGAWGFAYTTDLSKINEITDTAIRFSNSLKGDVELSETDIIKDKISVDVKIPFSDISIEEKKDIMKQANDAAIIDKVNSTTVSYGDSEVNELFMSSEGSEIQVKTSRVRMALNASATNGEIIQFGHGSLGGVKGFEAISDKDLEEFGRTIGQKAVRLLDAKPAPSGNFPVIADPELTGVLVHEALGHAVEGDLILQNDSILKDKMGCQIASDIVNIFDDASLKEGFGYYPYDVEGVKTSPNQLVKDGKLVSLLNSRETSSKLNMKSSGNARSLIADQPIVRMSNTYLQPRDNSFEELLEDIQDGIYLKGSRGGQVDTGKGIFQFNAAEGYLIKDGEITTPLRDVSLSGNILETLKNIDAVGNDFKLSVGFCGKDGQTAPVGDGGPHTRILNALVGGMG

SEQ ID NO: 10832 - protein, 401 aa, Methanobrevibacter gottschalkii
MIVIVGTGAGGGILAREIAKEGIDVTILEKGPYIHSKDAFNYYDTYSGDVDLLTTTCIGGSTIVSMSNMVRALDDELLDYDIDLSDAYEYVEDLINVHPIDDSHIGKGTKAFLDAGNELGLQTMKMPKAIREEECIQCGKCAFGCPVDAKFSGKDFIDEAVEYGAALICEADVREVTSNDGVVYGVKYIKDGKEEIIKADKVVLSAGAIGSTLILRKSGISKAGREIFFDPFVSVGGYLKDVNFNSEVQMAGLIIGKNFVLAPHYSSFIPGNIDDDSVTENDILSIMVKTSDECKGYVTDDGDVVKINTIQDIRYLAEGTATAGFVLERAGVDPNTIGSTVYRGAHPGGTAKIGEIVNSNLETEIDNLFVCDASVLPISPGKPPILTILALSKRLADYLKN

SEQ ID NO: 10833 - protein, 158 aa, Methanobrevibacter gottschalkii
MANNKSELKIKAIENGTVIDHITANKTLHILKILGLPDNETKNITVAMNVSSKELGRKDILKIENRELGHEELNQVALIAPEATINIIRDFKPIKKNKIVLPKKITSIIKCTNPKCITNYENEPITTIFNVVTENPPVVRCHYCEKLIKTEDIYKQFE

SEQ ID NO: 10834 - protein, 164 aa, Methanobrevibacter gottschalkii
MATLIIYYSQSGKTELVAHTLAKNLRANVLRIQDLKNRNGFKNKFIASISAFRESKTDITPARVDLTDYDTIIFGTPTWAGNPTPAILTIIDRCNLTGKDVILFATMDGSRGDTNIERLEEKVKMRGARVIESFTIATKDKDSEKLITDTEAVIEMKDLKMYTR

SEQ ID NO: 10835 - protein, 340 aa, Methanobrevibacter gottschalkii
MKNVAIVGASGYTGGELLRMLSVHPEVEVTEITSRKLDGQPVHKTHPHIRDTGLVFKDKKPSDIDADVIFTATPHGASMKIVPELLETGAKVVDLSGDYRYRNTEVYEKWYGMKHTDKKNKGAFGLPELYRDEIEKANLVSNPGCFPTGAILSSYPLVKNDLVEKIVIDSKSGVSGAGVTPSGTTHYPNIADNVNPYKISAHRHTSEIQQELHGFDDVKVSFTPHLVPVNRGIQTTSHSFLKEEHLDITPDEIRSLYEEEYGDEYFIKLMDEGEIPHLSSVRGSNFVHIGGFEIDETGRIVMLSCIDNLVKGASGQAIQNMNIVLGLKEQLGLQHLGIYP

SEQ ID NO: 10836 - protein, 150 aa, Methanobrevibacter gottschalkii
MKVMATGTFDILHPGHVLFLKKAKELGGEDAVLAVVIARDSTVEKRKRTPIIPQEQRLEMIKSLKPVDEAYLGHAGDMFKIVEEIKPDIIAIGSDQDHNVDKLQESLDKRGINAKAMRVEDYMFGELDSTCKIIKRIKHTDFKDKTGELY

SEQ ID NO: 10837 - protein, 245 aa, Methanobrevibacter gottschalkii
MSFKKDEMLIMPAVDIKNGKCVQLVQGEPGSEMVELENPELVAKHWEDLGARNIHVIDLDGTINGIASLDTIEKILNEISIPIQLGGGIRSLDYARQLLNLDIERLIIGTMGIQHPETITELSDEYGSDRIMISLDSKDNKVVIKGWREKIDKSPVELSSEFKEYGAGSILFTNVDVEGLLGGFYTDPVVELKESVDIPIVYSGGITTIDDIKKLNESGVDGIVIGSALYKDKIDLTEALKYQKR

SEQ ID NO: 10838 - protein, 316 aa, Methanobrevibacter gottschalkii
MNEKLYELFDVVLKSEFSIKEYDDKTIIELGENSKYGKMETYSLFPGIILAYIDVNIENVEDVFIEEKMESRLLEINHCARGRYAYAVGDDKIIYFGRGDLCVSIYDLTKSLSEFPLGYYEGLEIFIDVDMADEYIKDYVPDFDLIEFYETLEKNNGFVLLRANEKIDHVIGELYDVDERIKQSYYKLKCLELLLFFSITNFTKTESFSLSKKQVKIIESVKNDLTENLETKITIDQLANKYGMSKTTLKNCFKEIYGKPIFKWRKEYRLDYACHLIEEGHYSISEISKIVGYSSHSKFSQAFREYVGCAPSKYKN

SEQ ID NO: 10839 - protein, 596 aa, Methanobrevibacter gottschalkii
MSNNQNKNKFIRLLNYSGNYKYLTILGMIFSGLSAISLLVPFIYIWNVVNALLVVAPDFAKAQNLESYAVGAFFYAFLGIALNFCGLMCTHLSAFKNEKNMKDATINHLLNLPLGYFSNHTSGGLRKVIDFSTAKTEGFLAHNLFDLVGAIVTPIVFLILLFSFDLLLGLICIIPIILCFLFMYPMFSKDSQNIMAQYQSYLEKMNSEAVEYVRGIPVTKAFQQTVYSFRNFIDAIKNYGKFAADYSLSTQLPMTAFTVSINGFFALLIPAGILIAGTLVDVKFLANFIFYVIFTPICAVMMNKIMTISQDWMLASYALDGIEAILNEKPLAEPANPQKPKNHSIKFEGVFFDYEESNSEEHILNDINLKINENDSVALVGPSGGGKTTIASLIPRFWDVDEGSIKIGEVDVRDISTKDLMENISFVFQNTRLFKDSIYNNVAIGKKGASREEILNALSLAQCDDIIDELPDGIDTVIGTEGTYLSGGQQQRIALARAILKDAPIIILDEATALADPENEYMIQKAISEITKDKTVIMIAHRLSTVKNVDKIYVVENGRVVEEGNHSTLVENEGLYSKMWDEFNRSIQWKVKSEVI

SEQ ID NO: 10840 - protein, 581 aa, Methanobrevibacter gottschalkii
MLSELFIERFGLTKEGSDNLIKGIIYTALQNISFMFPVGLYAALLYIWINPLMGGEIISPDLGIFILGILIILGIIFAFSWKQYHFVYNTTYVESTNRRINLGENLRKLPLSFFERRDLADLTATIMNDCTDLEHVFSHAIPQLLGSILSLILVSIGLLIFDWRLAVALLWVVPVSFIILYISKRMIYRGSKIVTNDLLECGDSMQECIDSIRDLKSYNYENEYLSKLNDITSKIEKSRIKSELMLSSGVITGKVILNLGIVSVILLGSNLIMNGQVTIYTFLIFLIASATIYAPVENGLMFLSEILMMDIKIERAKEIEMLVTEEGLKDYSLDGYDLEFRNVKFNYDNLKDVLSDIDFIAKQGEVTALVGPSGGGKSTVSKLAARFWDPVSGEVSIGGQNLAELDSEKLLENFSIVFQDVILFNNTIMENIRVGKKDASDDEVINAAKLAECEEFVQKLPNGYNTIIGENGELLSGGQRQRISIARALLKNANIVLLDEATSFLDVENESKIQKAISTLIKNKTVIIIAHRMRTIANADKIVVLDDGRIVEQGSPDELLAQNGLFKHMVELQKLSGKWEI

SEQ ID NO: 10841 - protein, 193 aa, Methanobrevibacter gottschalkii
MSEILNVKDLITVGIFSVIMVVLIFLFGMLGYIPILMLALPIIAALICGVPYMLFLTRVTKFGMVTLLGLVLGIVMFLSGHTWVPIVIFTLFAFVADCILKMGDYSSVKNSIISYSCFIVGIMGNMLPFFVLRDYFIGSIRNSMGNDYVNVIAPFLNYEVFIILVILTFIFGLISAYLGKIVLKKHFERAGIA

SEQ ID NO: 10842 - protein, 240 aa, Methanobrevibacter gottschalkii
MELKLNNNPGLNVDPRTKIILLIIISFMVFNEAPLYVSGILVLIPFFCLFFSDYKKVALIYIAVYSMAIYVQIYLIPTSTGILSIILITFSYTSSRMLPIFMMGYYTISSTKVSEFITSMENINVPKEIIIPLSVVFRYVPSVYDEIKSITNAMKMRGFGLTVKSLKSPLKMIEFYMIPILISAVKTSDELSAASLTRGLSNPRKRTHLLEVKFSKIDYFLIMIAVIGFIIFAYYFIGGH

SEQ ID NO: 10843 - protein, 477 aa, Methanobrevibacter gottschalkii
MININNVSFSYNDDINLENINLNIKKGEVILLCGESGCGKTTLTRFLNGLIPNFFDGNRKGSVYMNGNLIDEMKIYEISEYIGSVFQNPKTQFFNVDTTSELVFGCENLAIDKDEIERRLEMVVNDFDLEHLLNKNIFELSGGEKQKIACASVSAVFPDILVLDEPSSNLDSQSTWYLGEIIKKWKSQGKTVIIAEHKLFFLENVVDKVIFIKNGRITNIWPISEFKNISHKDWGLRQLNLGNLTAKCGEYYSNAQEFLEFKNFKFKYKKIPVLDMGNFKVPKNEIIAIIGKNGAGKSTFANCLCGLKRSFNGELIFNNNSLKRKDRLKKSYMVMQDVNHQLFTESVLDEVLLSMDEEDIDFAESILTNLNLIHLKDAHPMVLSGGEKQRVAIASAIASKKEILIFDEPTSGLDLNNMMKVSENLKYLQSLGMTSFIITHDFELIMEACSHIIHLEDGKLIGNYKINGEKLSEFFLN

SEQ ID NO: 10844 - protein, 234 aa, Methanobrevibacter gottschalkii
MSTIIEFKNVCKEYKSGDHILKAMDNVNFTIGEGEFVVILGPSGAGKSTLLNLLGGLDSVTSGQIIVNDNHVESFTDNQLTEYRAKNVGFIFQFYNLIPNLTALENVELMKDIVDVKINGLDVLNSVGLEDHANQFPAQLSGGEQQRVSIARAVAKQPTMLLCDEPTGALDSKTGVLILNLLQDMSNNKNTTVVIVTHNAILADAADKVIRIKNGQIESIAINENPNKVTDLEW

SEQ ID NO: 10845 - protein, 756 aa, Methanobrevibacter gottschalkii
MLAKKMLRDIKKHKTQFLSIFLMAFLGVFVFAGVGGESVGLEVNVNNYYNDTNLADGWIYSPNLDMNFIDDVNNLTPTTQSERQLVLDSIADFSNNPEIKLHFIENNTISKFYLMDGEPLNISDEDGVWLDKSFADAKNLKVGDNITFEFNGFKIKKEIKGIGYSPEYVYHASTSSVIPDFNKIGFAYMSYKAFPTDNIPYNVLNVKFTGSPEEYNNLLSDKLDGEYNSFVEQSEHSSVSQFSEEINQHKMMGDIFPVVFILIAMLILLTTMTRIIAHQRTQIGILKASGFTNKSIMIHYVSYGFWLVLIGSILGLIIGPVTLPQLFYPSMSSTYKLPSWNPAWSMDFVYVAVVMIIMSLLVSYFAVRSISKENPADTIKPKIPKISSSGLVEKIGFWKHLSFNSRWNYRDAKRNKFRALMTIIGVIGCTALLVSAFGMYDGMNDLKEWEFNQINHYDSKLVIDNDASLSEIDDVARDVDGDKIMESAIEIESDSAKKSGSLIALNHTDLITPTDYDWNKMEIGDDEVSISQKMADMLDISVGDTVKWHIIGSDKWIKTKIDKIHADPTSQGIVMSSDKLENLDLNYTPTSIVTEQHVDKNYSIIKTVNSMKDITSSWDELTESMWLLIYILIFFASLLAIVVLYNLGLLSFTEIEREIATLKVLGFKTGSLRKLLLTQNLWFTFAGFILGLPVGYYVLKMMWDSSGDSFYILPSISPMNFILTATITFTLSILVNLMFSRKIKKLNMVESLKSGE

SEQ ID NO: 10846 - protein, 73 aa, Methanobrevibacter gottschalkii
MAKITADSKYMELLNKYPLLKRDLSQKNWKFEFLVTPMGKISLWEANLEEVSKHAELSVDETVTLFQDLVDSY

SEQ ID NO: 10847 - protein, 752 aa, Methanobrevibacter gottschalkii
MSLSKKMLRDIRINRTQFIAIFLMAFLGIFAYCGICSEYYGLEQTSADFYNETNLADGWIYKTSFDNADLDKINNLAMQTERQHVISSVGEFDNDPDITLHFVENNTISKFHVFQGKDFDINDESGVWLDKRFADSKELNVGDNITFKFDGKTIEKEIKGIGYSPEYVYESSATSITPNFEDVGFAYLSYKSYPDNVEFNRLLVKYNQSDDSFKEKLDDSISYLSFTKQEDHVSVAQFSEEMAQHKMMGDVFPILFILITFLTLLTTMTRVVTYQRTQIGILKAVGFKDRTIILHFISYGFFPVLIGSILGLIAGPMVIPKMFYPSMTTRYTLPSWNPGFDMSFVYVAAALVISSVIVTYLTCRRISKENPANTMRPKAPNVSSNSFFEKSKLWNHLSFNFRWNWRDARRNKFRALMAIIGVMGCVSLLIAAFGMNDSMDDLKTWEYDDINHFESKLVISNNASQEELYYVINGTNGSFIMQMPIEIKSNNHENTGVLLVSNNTDLISYTDSNKNPIEIKEGDISISTKLAQDFNLSIGDKIKWHIVGNDDWVKSEIGQIHAEPISQGLIMSPDTLEDEGLNFTPTSILTSEKFGENINSIKSVSTLEDMEESWSEMTSSVMMMVYVITVVACLLAILVLYNLGILSFTEMEREVATLKVLGFKTNFLRRLLLTQNLIFTAIGFILGIPLGFYFMTLMMDAAGESLYYVPMLTWGNIMLSAVITFSISIAVNLMFSDKIRDLNMVEALKDVE

SEQ ID NO: 10848 - protein, 238 aa, Methanobrevibacter gottschalkii
MKRSKKLIIAILLVILLGLVAFIVGTLFMTPDLSHETKNILVLASDKEEQPNGGVDMAFMIRLENGSLKNYTPIYPGGMTHPTKSAPGGLQGPMMLHDCLWNGLGEGMQNAKEIVEVRTGMHADAVVVVYDKGIDSIIDSIRPLKINGTETNLSATDIIRQNDAYNGYPGNEHVQGTMSRSDAVMVLAKALANTAKDPVKKSTMVQTALKEYSNGNIIMEPQGSFTKLLATKGFESIT

SEQ ID NO: 10849 - protein, 125 aa, Methanobrevibacter gottschalkii
MTMENNNLGNKDDLCEVFDSHEDVVNRVKERIPDESDFTELSEFFKIFGNPTRLKIISLLSIEDLCVCDICEALDLNQTTVSNQLRILRANNIVKYQKEGKMARYSLTDLHIEMIYKVGLEHILE

SEQ ID NO: 10850 - protein, 784 aa, Methanobrevibacter gottschalkii
MVKNRCYDADCDKDNCHNPEHYNYICFDPNCDEIKCNDSDHYDKQLLRDYQKNTDLSVYDHGEEIDYDEDVDISLCGCPDCADDHDHDHDHHHDHSHDHHEHDEDDSCSDESCSCHDHDEHDHHDHDDVDISLCGCPDCADDGHEHGHGDEELLAEGKPLIANRPIQIIVSSGILFVLGHVFEWLSFSPAVVTIIYMLGALIAGYEIAVLAYNSLVKRHTVGPAMLMCVACVASFIIGHPEEGAAVTFLYYIAEFLEDYAEHRAKRSIKSLVEIAPETARVKLNDSEELRNVDDVDIGEIVIVKPGDKVPLDGEVVLGSSSINQSSITGESVPVLKETGDEVFSGTVNEDGYLEIAVTKKAKDSVISKIVTLVKRSQLNRSETESLVEKVAKYYTPIMMVAAICVALIPSFVFGQNLVDWVYKALSLLVISCPCAFLISTPVGMVSAITSATKNGVLIKGSTYVEEMRDVKAVIFDKTGTLTEGKLILSDVEVLDENFSKEDIIRIAASLENQSSHPIAQAIVNYATVNGIKFSEINDFKNVPGKGIVANIGEEQYYAANESLIEDGSFEVSRDEINRYSAEGKTIVFIGNSKNVLAIITVSDKIRPNAHEVISDLKEQGVQTIMLTGDNKLAAKSVASEIGMDYVYSNLMPEDKLNILDTIRNKFGDVAMVGDGINDAPALARANIGIAMGAAGSDVAIETADVALMQDDISKLPYLFTLSRKTMGIIKQNITVAIAVKLLCVILAILGIITLMMSVGFGDLGLTMLVILNSFRIGMVKDPLF

SEQ ID NO: 10851 - protein, 456 aa, Methanobrevibacter gottschalkii
MLSNDLVNGVELMLQNPKKALIEMSIPLIISLLITSFYNLIDAAWVSGLGADALAGVGFFTPIFMILVGFGNGLGSGAAFALSKYLGGNNKQKADNAAIHSIIIDLIASLIITLALLVLLNPILNAMGAGQTIGYATDYGMIIILGSAFIILSNALYGISRGEGDTTRPMYAIIASAILNMILDPIFIYNLNLGVKGAAIATIVSSVFVILILLYWFYIKGDTYLKPNLSNFDFKKDISIDIIKVGVPASIQLLNNAFFAAVFSALLTFVGSTDSVAVYSTGWRIVTIGTTPLIAIGTALISVIAANYGAKNYKNIQIVHRYAMKVSIALAIIVAILTNVFAGDISSVFASSGSSVRIAAELTGFLSWIVIYYPTMAVGVASTYVFQGIGKGITAMFQTIIRETGFTITFAVLFAVVLNYGVWGAWMGIVLGEIVSNNLTMLWADYLVKKLIDISG

SEQ ID NO: 10852 - protein, 204 aa, Methanobrevibacter gottschalkii
MELKGSNISFKYPSTKKYILKDIDICIDNTKITALVGDSGSGKSTLCKILSGYTNNFEGAVTLDGKELPKKEFCPVQLIFQHPEKVMNPKWKMNHILEESWMPDDNLLKEFGIQKTWLTRFPQELSGGELQRFSVLRALNPKTQFIIADEMTTMLDAITQVQILTSVIEIVKKRNMGMLIVSHDMPLVETICDEIIYLKDINGI

SEQ ID NO: 10853 - protein, 319 aa, Methanobrevibacter gottschalkii
MEKLLDVENVSISFIQYTQGLNQRDLKVITDLTLDVFEGEILAILGSSGSGKSLLAHAIFGILPENANLNGTIKYKGKELSQKDKEEIRGKEIALIPQSVNFLDPLMKISDQAIGETKDDAEKKEKKQKQREIFEHYNLGPEVDDMYPFQLSGGMARRVLVSTALLSNPKLVVADEPTPGLDQKTVKETLNHFKHMKEDGVGVLLITHDIHAALEVADRIGIFYSGYVIEIAENKDFSGNGENLLHPYTKALYKALPANGFELTEGHQPLHGEIPKGCPYYDRCEMRMGICKEERPELTDLGNKKVRCFKYEGGLKNGT

SEQ ID NO: 10854 - protein, 284 aa, Methanobrevibacter gottschalkii
MNNSNKSIYSPISKMNLRTKTLLTIGLTVSLLIIVMITSLLINSTDITTNFSAMNLPPSFEHLFGTDWLGRDMFIRTLKGLGLSVQIGAGASILSSLIAIILSFVCSINKKFDSFVAWIVDLFLSIPHILLIILISISLGGGAFGVTVGVALTHWTTLTRVLRAEIKQIKTSDYVKLSEQFGKSKFWIARKHILPLVITQIIVGTILIFPHAIMHEASVTFLGFGLAPHEPAIGIILSESMKYLATGNWWLALFPGLALLILVLLFDIAGENIKKILDPTSANE

SEQ ID NO: 10855 - protein, 331 aa, Methanobrevibacter gottschalkii
MLKNEKILKFLGKKIIRFIILLIFVIILSFILIDMSPINPVKTYISALGSVSSEKIAILEAYWGVNEPITTKVISWLGKIVQGDFGTSLIFRMPVIDVIKERFIASLVLMLTSWLFSGLLGFILGTIAGFKKDTIIDKAIKVYCYILQSAPTFWIALLFLMIFSVYLGWFPTGLGVPIGTLSENVSIWEWLHRLILPMITLSVVGIASITLYTRDKLIEVMNSDYFLFAKARGESGWNLIKRHGIRNILLPAITIQFLGFSELFGGAVLVEQIFTYPGIGQAAVSAGLKSDVPLLLGIVIFSAIFVYCGNLIADILYNFVDPRIREGEEDE

SEQ ID NO: 10856 - protein, 542 aa, Methanobrevibacter gottschalkii
MEQKYIIGIIVLILIAIIGGTLFMSGGNTSTRADNELVVSAFVHGSEPETGYDPMYGWGDRGEPLIQSTLMKMNRNMTYDNDLATSWSSNNNFTEYTVNIRDGVKFTDNTTLDAEDVAFSYNQAKSTGNTIDLSSLDNVSAINKTTIKFKLNKPDSTFTDKLLHVGIVPSDSYDNNTYGSNPIGSGPFKLAQWDKGQQVIFEKNPNYYGKQPKFDKLTISFQKNEASFNAAKNHELDIAAVPLSYANETIDGYHSFLSESNDVRGISLPMKNNTGETNEDGIALGNNVTADKSIRLALNYGINREDICKGALNGAGVPNYDGIAHFLPWYNNDSTIKDADIDKAKDFLKKGGWKDTDGDGIVEKDGKKASFNLYYSSDAPERQAIAVAVSEQAKEFGIEINATGSNWDEIDKIKFSEPVVWGFGSTDPYVMYGEYYSNQAGIGYNNPSLVNNSAVDSHIDKAMSEPREQSYADWSAVSWDGQTGISPKGDAAWLWISEIKYTYFVDDSLDISKDTFKLQPHGGDLFGNIYDWTRISPINATN

SEQ ID NO: 10857 - protein, 539 aa, Methanobrevibacter gottschalkii
MEQKYIIGIIAVILIAIVGGAILIGGPSTERADNELIVAAYSHGGEPEAGFDPILGWNYYSEPLIQSTLLKMTRGMEYENDLAKSWEANSDFTEYTVKIRDDVKFTDNTTLDAEDVAFTYNEAKKSGASLDLSSMENATAVDKQTIKFELNRPDSTFVDKFAYIGIVPSDSYNNETYGANPIGSGPFKFVQWDKGQQVILEKNPDYYGKEIKFDKLTILFEQNEAAFNAAKNKEVDIAAVPLSYANETVDGYNMHLMDTIDVRGLSLPVQNNTGKLSEDGNPIGNNITADKSIREALNYGVNRTAICKGALNGIGVPNYDGIAHLLPWANNESAIDDGDVDKAKDILKKGGWKDTDGDGIVEKDGKKASINVYYSSNAPERQAIAVTIAEEAKEFGIEVNATGSNWDEMDKIKNTDPVVWGFGSTDPSTMWSEYYSDQATVGYNNPALINNSAVDKHIDNAMKSDRESSYAEWSAVSWDGQTGISPKGDAAWLWVGEIKYGYFVDESLDISNNTELIQPHGGDIFGNIYDWSRVSSIEK

SEQ ID NO: 10858 - protein, 204 aa, Methanobrevibacter gottschalkii
MELKGNNVSFKYPSTKKYILKDIDICIDNTKITALVGDSGSGKSTLCKILAGYVQNFEGEVTLNNNKLPKKEFCPVQLIFQHPEKVMNPKWKMNRILEESWMPDDNLLKEFGIQKTWLTRFPQELSGGELQRFSVLRALNPKTQFIIADEMTTMLDAITQVQILTSVIEIVKKRNMGMLIVSHDMPLVETICDEIIYLKDINGI

SEQ ID NO: 10859 - protein, 319 aa, Methanobrevibacter gottschalkii
MEKLLDVENVSISFIQYTQGLNQRDLKVITDLTLDVFEGEILAILGSSGSGKSLLAHAIFGILPENANLNGTIKYKGKELSQKDKEEIRGKEIALIPQSVNFLDPLMKISDQSIGQTENEEEKKEKKQKQREIFEQYNLGPEVDDMYPFQLSGGMARRVLVSTALLSNPKLVVADEPTPGLDQKTVMETLNHFKHMKEDGVGVLLITHDIHAALEVADRIGIFYSGYVIEIAENKDFSGNGENLLHPYTKALYKALPANGFELTEGHQPLHGEIPKGCPYYDRCEMRMGICKEERPELTDLGNKKVRCFKYEGGLKNGT

SEQ ID NO: 10860 - protein, 186 aa, Methanobrevibacter gottschalkii
MDVIIKELGKNSKEIAEVQEFLFKMIKLEFGYDYVPQWHQDIINLEKYYIDPKRNNFFIAYTKTGEIIATIGIRAYDKDFPEFRHLYSIDNTSSIWRLFVDRRYRRCGLASKMFGIVENFANTLGYDNIYLHTHKTLDGAIEFWTKMGFVVALDSNDELETVHMDKKIQGVNISDNIVDYKYAVKL

SEQ ID NO: 10861 - protein, 230 aa, Methanobrevibacter gottschalkii
MSLSLKLKQYLTDQGADEVGFADITNFTPKKNLNKGVVFYITYQKETLRQMQNAPTKEYLNELINLNLKLDELGMKCEEFLIERGYNAYAQTKKRLGYDFGEFNSFELPHKTIATRAGIGWIGKSALLITEKHGCALRLSSVLTDAPLNPGKPILKSKCGKCMECKTACFGGAISGKKWNYKINRTDFYDDKKCEKYALKISKENLGKSDTVCGKCIYACPYTQKYIKKS

SEQ ID NO: 10862 - protein, 538 aa, Methanobrevibacter gottschalkii
MDKKIIIGAIVVVLVVIIGAFAFMGGSHDSDPTHLTVAAHSNIKEPEAGFNPLTGWGCGHQNYNPLVQSCLFKTDKNGSIVPDLATGYSVSGDGKTWTVNVRDDVKFSDNSTFDAEDVAFTFNTAKQTESELDLTNIANVTAVNNTCVKFNLVEARSTFIYDLRYLGIVPSDSYDNSTYGENPIGTGPYVLDHWDKGQQAIFKINDNYYGDKPYFTQITLLFPEEATWLELAKSGEIDVVPVATSALNQTVDGYQFIEKSAGRAQGVSLPYLNDTGIMYNGTMKVGNNVTADKSIREALNVGINRQTMCDEIFAGHASPEFTGVDTRTYANPDAKVADGDVSKAKQILKDGGWTDTDGDGIVEKNGLKASFDLYYPPDYLDRQSMSTVFAEQAKELGIEVKLVGADWDTIYKNLYSSAALMQQTSPDPYKSIYQQYHSKEMDGFYMNPNLYNNSASDRLMDEAMHTSDLNQADSLWSQSALVNGGGWGPAGDAPWVWIANYDYNYFIKDGIDIGKQPDGLGNDVLINICDWSRTNSTA

SEQ ID NO: 10863 - protein, 329 aa, Methanobrevibacter gottschalkii
MNKNQLLKFFGYKLIRFLILMIAVSIFSFVLLDLSPIDPVNAYLKQAAVSEAQRQILQEYFGTNVPLTTKIFHWLIDLFQGNLGTSLIYRAPVVDIILEKASASIVLMAISWLLSGIIGFLLGVVAGKNKGSWIDKAVKVYCYAIQSAPSFWVGMLILMVFAVYLGWFPIGFGVPIGVRSTDVTFAEWATRLVLPTLTLSLVGLAPIAMYTRNELIQVLSSDFVLFAKSRGEKGWNLVKNHGIRNILLPAITLQFLSFSELFGGAVLVEQVFSYPGIGQTAVAAGLQNDVPLFLGIVLFSAIFVFVGNLLADLSYYLIDPRIKEKEFND

SEQ ID NO: 10864 - protein, 283 aa, Methanobrevibacter gottschalkii
MIKKADDKKQWFLYPANLRTKTIVIIILSALVILSIFISGYFIRDIPTSFINANQMPSLEHLFGTDWMGRDMFQRTIAGLGLSLMVGFIASIVSTVISIILGLFSSFNKFTDEFVAGIIDLFGSIPHILLIILISMMFGGGVIGVVMGVGLTHWTPLARVLRSEVKEIRTKEYISLAENLGKSKMWIAIKHILPLVISQIIVGVILMFPHAIMHEAAITFLGFGLPPHEPAIGVILSESMNYLSSGYWWLAFYPGMSLLIVVLLFDFIGENVEKLLNPETAQE

SEQ ID NO: 10865 - protein, 230 aa, Methanobrevibacter gottschalkii
MDLTQKLRKYLIKNGATEVGFADIINFTPITGLNNGIVFYITYPKETIRNMKNAPTKEYNEEYDKINYKLDELGMKCEEFLIKYGYNAYAQTRQRLGNDFGEHNSFKLPHKTIATRAGIGWIGKSALLITKKYGSALRLSSVLTDAPIKTGLPTIKSECGKCMECKNACSGGAISGTEWNYKLNRNDFYDDKKCEKYALKVSKENLGDEKTICGKCIYACTFTQKYIKKA

SEQ ID NO: 10866 - protein, 288 aa, Methanobrevibacter gottschalkii
MKRTALKIGYIGTNFHGFQRQPDLRTVEEELIYHLRKLNYIDDLKKSRFRIAGRTDAGVHSLGNVISFQSEKDVRINEINNSLPDDIQILASAPVRYAFKPRYAQMRQYRYMLFQDLDIDKLKECADIFKGTHDFTNFTKRFQKTTTRTIDDIKIKKFDLEDYHKKGFPNLHDTLSPIFVDIYGESFLWNMVRKMMRVFVDVAIGKMDLDEVERLLNPEENESRANIKVMEAEYLILMNIQYDGIKFRYDDYACERFKRDLVDSLSDLQKRYAIRESMIKSLQDLHEW

SEQ ID NO: 10867 - protein, 440 aa, Methanobrevibacter gottschalkii
MKIATILGTRPEIIKMAPIIDEISKRNIDQIVLHTGQHYDEEMSDTFFRDLDIRTPDYNIQVGSGTHGKQTGLMMKGIEKVLLDEKPDIVLVQGDTNAVLAGALVASKLHIAIGHVEAGLRSFDMTMPEEINRRAADVCSTMYFIPTAESAINLLAEGYSRKNLFITGNTVVDACFRHLKIAKKRGIKEKSLKELNIDKMDNILTLTMHRAENVDVKERVVGIIEALKELDDADIIFPIHPRTKNTLEKFGLFDELNNLEHVHIIKPLGYLDFLLLTSASTLILTDSGGLQEEAITLSVPSLTLRYNTERPETVTAGGNILVGSDREAIVSNARKILDNKNFADKMKNAINPYGQGDSAKLTVDAIEDYHARGLLDIVAPEDIMNSFKRKMKNIREDISVKDFERKENALVHMVFDGKNMQFPTDELNLNGMVINYDKRE

SEQ ID NO: 10868 - protein, 362 aa, Methanobrevibacter gottschalkii
MTKENESILVFEYFTASGEKDKCIISEAEALLFSLLDDLKEFNVDLIINESYGSVVKNYGNVNPILINQDVVSWLEENADQFNKAIFISAENNNNLYNITKILEENDVKIYNSSAEACLKSSDKYETYEALPNTIPQPRSFRFKIDSKGYWKRAIENLHERWQAEDPLTPLKLIIKPLMGVDCEDIVIIEKIEDLTLDLDKIFTPGSRVLVQEYIEGSDISVSLISDGKNALPISLNEQYVELKENKGIYMGGRLPFESKFKDEAFDIATKAIESIEGMKGFVGVDLRINSDEKDIYSLYLLEINSRFTTPYVGLSKIANFNISKTIIDLIDGNINIGDLDISLDGEIEFKKSGNSLEIRRI

SEQ ID NO: 10869 - protein, 340 aa, Methanobrevibacter gottschalkii
MKVAGFDIGGANTDLAVIDFDGEEIKNIEVDFAYLPMWSNNDDLSRVLTELIENICPVSEIDAVGISMTAELVDAYDTKKDGVLDVVKKCEKTFDCPIAYVGIDGMLSKEEIIKTPLKAAAANWIATAQIATLISDNCIFIDTGSTTTDIIPIKDGVECAIGKSDFDRSATGELVYTGTLRTNLTSFLDKIELNGKEYRVASELFAQTADVYTVLDLITEEDYVCDTFDGEGKSKIECAKRIARVVCADLEMMTMDEIVGMSKFIHQKQVEQIADGLKQVVETQNLDLIVTTGLGKDILDKKAAELLGLEVKSMGDILTDEECVVAPAIGTSVMMNKYLN

SEQ ID NO: 10870 - protein, 188 aa, Methanobrevibacter gottschalkii
MTINIQILLIACVTTLYFILPAYFSNGAGLLFGGGMPVDFAKSDRYGIRWIGDGVTWRGLFAGTIIGIITGIVQGFIAPHILPAYGQYIITPIVTNINSGILIGFLLGFGALLGDAMGSFLKRRLGIGRGKPAPLLDQLDFLIIALILVSLVVKIDLLFIAISIILTLVIHLIANTCAYLLGIKDVWY

SEQ ID NO: 10871 - protein, 502 aa, Methanobrevibacter gottschalkii
MKIKSTKSLCPECGKPIDAEVYDEDGKVFIKKTCDEHGEFINTYWGDDELYNRANNYLPSITSIENPCIEDTASCPSNCGLCSKHETSTVLGLIDVTNRCNLRCPVCFANAAAAGYVYEPTQDEIRQMLKNLRNLKPNPTPAIQYAGGEPTVRKDIVELIAMAKEEGFTHVQIATNGIRLAKRENLAKDLKAAGLNTVYLAFDGVTPEPYINNRGKDLLPFKLEAIENCRKAGLGVVLVPTLIKGINDHQIGEIIKFAFDNNDIIYGVNFQPVSFSGRTPADQVEAQRITIPDFVKIIEEQTEGQVKTTDFYPPSAVEPVARFISALDGEERPPVTLNCHQHCGVGTYVFREKTEGSGRDKLIPITNFIDVEGLFEKLDEYADKLIEGKFGARKKVIASVTKNLPKLIHPSKTPDYLDIKKILFDVFAKRSYSALGDFSKDAMLISCMHFMDPFNFDEDRVKKCVIHYATPDGRIIPFCTMNSIYRQSVEQNFAKPLKQKKE

SEQ ID NO: 10872 - protein, 161 aa, Methanobrevibacter gottschalkii
MDIIKGKTWTFGENIDTDVIIPGRYLRTFNPQDLADHVLEGERPDFTQNVQKGDIIVADENFGCGSSREQAPVAIKTAGVSAIVAKSFARIFYRNAINIGLPVIVSDIEAEDGDVISIDLSEGKLVNETTGDSKNFEPFKEFMLNILEDGGLVNHYLNESD

SEQ ID NO: 10873 - protein, 209 aa, Methanobrevibacter gottschalkii
MECPICGSDNVEILNAKQKSSKKKLMEEYLLKCEDCGHVFKDIFSAKKPKPYRLIISAHDKSHKTTIDLSPSDELKSGDVLLSDLGQVEVTSIEVGDKRVNKAKIEDINTIWAASTEIPARIGFSVDLHGEVDSYKLDLERDFEIAPGDIVKIDKHIVKVHVIKTKDRKLTSGFAKAEVIKRVYSKPVKFNNFDYDLTKDIFKKTKKSS

SEQ ID NO: 10874 - protein, 425 aa, Methanobrevibacter gottschalkii
MKVYIESYGCTFNKADGQIIAGNLQENDIDIVGSMEEADVIIVNTCYVKLPTENKVTYRIQKLQNDFPDKKIIVGGCMVEIDPEKLDKVAPNASWIGPHQLNKSAEVVKSTYCGEVVRESGFSKESKVDVPKVMDDSLIHIIQICEGCLGACTFCCTRFARGPLNSYPIEDIKEEARKAIEQGACEIQLTAQDTAAFGKDSGEKLSDLIKEVANLDGDFRIRVGMMHPKNILNDVDEIIDAMKHPKVYNFIHLPIQSGSDKVLSDMRRGHSVNQYLDIVSKFKSEIPSLTLAVDIIVGYPTESEEDFNLTVELLEKIKPSLIHLSKYQHRKGAVSSSLPEIPHETMKRRSKFLSEIKSKITEEENKELVNSNQKVLVIEKGSKGGFIAKTNSYIPVIVDNVSLGTFVDVKITDATATYLKSELLG

SEQ ID NO: 10875 - protein, 66 aa, Methanobrevibacter gottschalkii
MSELPIAPVGRILKNAGAQRISDDAKIALAEALEEKGDEIAQKAVNFARHAGRKTVKAEDIKLAIK

SEQ ID NO: 10876 - protein, 240 aa, Methanobrevibacter gottschalkii
MTYNIKNSKELAGLINYTNLNNIITESEMVEFLEKAKETNFNSVVVSPTYVKLAKETLKDTNIKVGSVIGFPLGFEDTESKVEAAKSLLDKGVDEFEVVLNLSYLKDEKYELLENEIKQIKEAIGDKVLKVIIETKALEDYQKANAAKLAEKSGADYVKTSTGFVSPSHIFENVNDINIIQKHAPTIKIEIYGGINNYKFANQILTGGADVIGSDQGYEIVKRYKDLRENTQVKPKPITL

SEQ ID NO: 10877 - protein, 557 aa, Methanobrevibacter gottschalkii
MEKACRIIINDILNGEISTRRDLEVAKRQLCRDLNLSRFMSNADILEFAKPEEKELVSGILKKKPTRTMSGVAVVAVMCHPHKCPHGRCFYCPESDIAPPSYTGEEPAALRGRMYEFHPYIQCFNRLKQLKKIGHPIDKVELIIMGGTFPSRDLCYQEWFVSQCLKAMTDFGLILENKPTNYEYNLDFNEIRSFEKGILKTYPPNDYVLISDVQKANENSKVRCVGMTFETRPDYCKKDHINRMLDFGVTRVELGVQTLSDDIYSKIKRGHKIADVIESNQLLRDSAIKVAMHMMPGLFSDEKQDLKMFKQLFHDDNFKPDMLKIYPCLVTKGSELYDLWAEGKYAPYTDEEAVELIVKIKKILPKWVRTMRIQRDIPSTLIEAGVKKSNLGELVYNRLDEEHINCQCIRCREIGHKKTSKQYSLDEFELFNESYKACGGVENFLSIEDINEESVAGFLRLRFPSKDHFRDEISDKTALVRELHVYGNMIKIGNRNPHIGQHTGFGERLLKEAENLAIDNGKEEVAIISGIGTRNYYRKFGYEKVGPYMVKKLYKNI

SEQ ID NO: 10878 - protein, 91 aa, Methanobrevibacter gottschalkii
MQIKEFLGSVVLDKNAYEVGKVSNVEFDAATGKINEITLTLQKNIFSKDELVISFDDIATIGAYVILNKEIPKDAEFEEAEAVEVEIEEDK

SEQ ID NO: 10879 - protein, 98 aa, Methanobrevibacter gottschalkii
MVFDARDIEIPLNSHVRYVDTGTMGEVVDERITDGIGWVKLGKTGLWYKSSHVELLAEKDIKKSSWGAGKDLDVEDLKEKAISFEELELSSDAGNGGG

SEQ ID NO: 10880 - protein, 689 aa, Methanobrevibacter gottschalkii
MENLDTDIKKIINSAYPYIKDFNPAQKAVIESGYLEDNSNYIISIPTASGKTVLGVLPALKTILNGGKAVYAAPLLSIQNEKVKEFKAFEEYGINVGKHPSSADLSVMVFESFDALTRFSWNVLREVDTLIIDEFHMIGEYSRGPTLEAAITRAKIINPNIKIIALSATLRNIEEIEGWLDGTCVEHDYRPVPLHKEVLDAEMFNTKNKNDVIVKIVEKAMKDSSQALAFVSTRRFTESLATYVAKKINKKIDKKQREKFKEVAEKLLDVPKKKGSLPTSTCLKLAESVELGVAFHHAGLFNEQKEIIEDEFRNGNILMITATPSLMYGVNLPSKTVVIRDHTRWTSNGPQPIPVFDYEQMSGRAGRPQYDDVGYSYLIAKTMDEAQNLEEYYVEGEIEKTNSKLVDNKDAIYKQIIAQIASSLSKNLDELVDFFGKTLYGYQMNNNPSMSSFAEYTIKYELETALEFLLQNGIIRATPEGLKTTDFGYLIAKSNYAVETAVKIKEYISNMNEINVEEFIYALSETPDLPLISFKGRKSKDPVRDRLSECGLFAMDIGVSEATTVSLIEWIDERNEYEIENKYNVYSASTRRSAYEASRLVKFAKDTSEILGDYSNLKEYDILSARLYYGVKTDIIPLVIGVKRLGRKRARNLVKLFGNNLSNISENELQKVEGIGPKLAEKIRLFVKN

SEQ ID NO: 10881 - protein, 87 aa, Methanobrevibacter gottschalkii
MAIKVEVFSTSTCPHCPAAIDAAMKAKDKLGNAIDVESVKIDGNMDNRQRAMDYQIMAVPTIVIDGEVAFVGAPAESELIEKLESML

SEQ ID NO: 10882 - protein, 358 aa, Methanobrevibacter gottschalkii
MTNDNYTCVTTGTVATACSLAALDAILNTPDIACVKVETPKKVLNIIIDECKCISNNKAYAIAHKNPYNDPDVTVNLDIISTVELLDKNDEESNVIITGGEGVGVITKPGLQIPVGEYAINPVPRRMIIKNLSSKIPKGKVAKVTISIPEGRKIAKKTMNPKLGIVNGISVLGTTGIARSMSSEAYKNSIVTQIDVAIASDIDDLIFVPGNIGEKLALKQLDVKKEQIIQTGNFVGFMFDEAAKRGIAKFTFFGHIGKLIKVAGGIFDTKHAIADGRREIMVTHAALCGVDKINLQKLFDSKTTDEMMSILDGLGVSVEVSNSIASAIHDRCMQRFDLDLNVILVDMEGNYLNNNFII

SEQ ID NO: 10883 - protein, 360 aa, Methanobrevibacter gottschalkii
MKIAMVGQFPPHVGGVGVHIHTLSKKLVDEGHEVYVITYPHRNIEDIDGIHVIGTKGLNLPGVRGLMFKMNAKKALEDLLEKEDIDIIHGHYLFPAGAAAVEVGREHNIKTYVTAHGSDMFELYKKQPFMRSPIKKVLRDADGVFAVSNALRHEIIATGVTGIANKTKLSWNSVDINKFSSKTNDLFKKENKLEDKPIVLFVGNLIKRKNVDSLLDAKKVSQSEYYLVIVGDGPQFKKLNKKVEEENIHDVIFTGSRNDVENIIPSCDVLILPSFSESFGLVLIEALACGKPVIGSDVGGITEIINDDVGLLVNPNKISSIAKAIDTIIQDDDLRLVFSLNARNRAFDFSEVTIPYDEVN

SEQ ID NO: 10884 - protein, 288 aa, Methanobrevibacter gottschalkii
MKTIVRSPGSATIINAIATGFGSAFGIDLDIKCIAKTTDKGITCLNDVGADIGFMELCVQRVFNHYNIDTSEFGIDLKTESNLPMASGLSSSSASSNAIVKAVSSVISEEFNLKPLDDLELINMAIDASLEAGVTITGSFDDATASYFGGVVVTNNKNREFIIREKMEEYPVLVYMPNYYSKSGDSNSDRMKLLAPLVETAFEFACNKDYFKALNLNGLLYSAALGFNSSIAIDALESGAIASGLSGTGSSFVAVSNEDTIDDIIYSWEKYEGTVIETKIDNVGCKIL

SEQ ID NO: 10885 - protein, 423 aa, Methanobrevibacter gottschalkii
MKKIYSMLLLIVMLCSLSIVSASENLSTSDNPVVVDNVDMSSKNIGSIPDVTSASNDVVVSENSSVEWKSYENEKDDNVSDNQSNSSSNSTSNGSYKEESVVSNVVTKNVSSSYGTVVNYNIKVLDQFKKPMVGKTVSVTIGKKTVEKITDSDGMVTFTLNCQAGKYVIKYKVDNINGSNSYIVKNKISLTVLNWNLKGDVSKINLIKKNMPNNTWVKKAVAATKKGIPLLKFKGGKGKIVFMTAGVHGNELSSQVAAMKMIKYLSDNPISGTVYIMPFVNVKAIAKKVRYTDKDYNRIASSSGTIPNKIVKLVVKYKCNSYGDFHTTKPGGAPGKDIVMGSKSLKSKSADLTNYIAKKCKVNKRIYSHIGQEYPGALFENVNKKGITSVICEVALPHNTVTTKTVKTSFNMMKYLLKYNSVI

SEQ ID NO: 10886 - protein, 116 aa, Methanobrevibacter gottschalkii
MIFLNRSYEIKSFKNKKEAEELLKKSRKSIDEIDNQLFDLISQRTALAKDIASSKEYLEIPIFDKSREKVIHDKIRRLSEEKGLDVDIINQIVDMLTILNKNAQKEILRRNVDGKY

SEQ ID NO: 10887 - protein, 65 aa, Methanobrevibacter gottschalkii
MGNIRTSFVKRLAKELIETHKGVFTTDFEQNKKLVQEYSTVSTKHLRNKIAGYVTRLIRLEQTRE

SEQ ID NO: 10888 - protein, 406 aa, Methanobrevibacter gottschalkii
MDLIVVKFGGTSVGDGSRIKKAAQSVVNEYMKGSQVVVVVSAVNKTTDELIGLSNDAIGTGLTDKQKAEIMAMGELTSARLFSATIESLGVKSEFIDPYNKLWPIITDSNSLEAKIDLNTSNKKTEGIKQLVNQGVIPVICGFLGKGPSGEITTLGRGGSDITAFLMGHCLDANEVVIVTDVDGVMSTDPNKIEDAELLDTISVEELRDLATHGAQVLHPHALKYKDPLISAKIINFANEDLSSKGTRIVGPFEGEMLKCVTLYKDPISLIAIVGEAMLKKVGLMAKLTTALADDGINIFGMSAGQNSITVFVNKVDSNKAYLLLHQLVIDTDVLSSLSLGRDTAMITFVSPDIIETPGIISDITEPLRKNNINILEITSSQTAVVLFVDWEDGEKAHKLITEVLE

SEQ ID NO: 10889 - protein, 297 aa, Methanobrevibacter gottschalkii
MNFEGTYVAMVTPFTKDGTFDEEGFRSNINYLIDQGVNGLVGAGTTGESATMTHEEHHKVIEVLVDEVDGKVDTIAGTGSNSTSEALSLTKFACDAGVDAALLITPYYNKPQQHALVKHYGTIAEACDLPIIAYNVPSRTGCDIEVETAVELAKIDGVDAIKEASGSVDKVSDIYRALANEDLESEFNILSGEDSLTLPIMSVGGTGVISASANIDAKRMVLMVDSILNDDYTRALELHYEMLELIRAIFVESNPVPVKTAMNLMGLPSGPLREPLCEMKDENLEILKIALKNSNLI

SEQ ID NO: 10890 - protein, 273 aa, Methanobrevibacter gottschalkii
MIKVAVTGAAGRMGSGIIKKITEQDDMEVVAAIEMPNTPLAGKDAGLQAGIGEIGVGIVGSERLEETLKSSGAEVLVDFTIAPAAVETIKTATSCGVNVVVGTTGFTDDQMALNIKNVEDNKVGAVISSNMAIGVNVFFNTLKKLAPLLYDFDIEIIEAHHNQKKDAPSGTAMTAFEVITDALNRNPEEVGVFGRKGLVGKRTPEEIGVHAIRGGDIVGDHTVMFVGEGERFEVKHQAHTREVFIAGVIRAVRYVPTAQKGVVSSMNDVLGLE

SEQ ID NO: 10891 - protein, 349 aa, Methanobrevibacter gottschalkii
MVKVGVLGATGMVGQRFIQLLENHPDFEVTALAASSRSAGKRYEDATTWYLDSEMPNSVKDIIVCETNLEDMDNDIDIIFSSLPTEFASKVEKKFAKDYVVASNASAHRMKKNIPLVIPEVNPEYLDMIDAQQKENNWDGFIVTNPNCSTIALTLTLKPIVDNFNVNSIRVSTMQAVSGAGYNGVPSMAIVDNLVPYIGNEEEKMESETLHLLGSYDGNVVTNADFRLSASCHRVPVIDGHTEAVFVELDDEFDIGDVKNKMANFKALPQKLNLFSAPENPVIVKEENDRPQPRMDRNAGNGMAVTVGRMRKDKIFENSFKYVLVGHNTIRGAAGASILNAELINDKIL

SEQ ID NO: 10892 - protein, 385 aa, Methanobrevibacter gottschalkii
MELGMDVEKDTLQSLIRSCLLELNKLKYDLTELEVERANDNTPQRIKELEKDIVDKEKEVSVIKFKAEDEINLLKKQLGEKDILIKNQEDRIYELDYVNNSLDEIKEYFAEQLRDYKKKELADVNERLTDSFKSIAEKEATINTLSRTIDDYKIKVIKLENNVESQAQILELEKQLELKENEIRIKDSEINKMDGELDNLKQQTIPKDEYVNLQSKFKSEITAMDAEITNLKQETIPKKDYEHLQSKFDSEIKNLDNQINSLKENTIPKDEYVSLQTRFENELSARNSELEYLKERSIPKEDYLTLKTQLQNEISSRENELRFLKEQTVPREDYLKLQNELTKKDGKIKRLEEINAFFNELQEEQEAYETQETTPPFRLEKKQGR

SEQ ID NO: 10893 - protein, 536 aa, Methanobrevibacter gottschalkii
MAQGQPIFILPEGTNRSVGRDAQRNNILAGKVLAETVRTTLGPKGMDKMLVDGLGDIVVTNDGVTILKEMDIEHPAAKMLVEVAKTQEDEVGDGTTTAVIIAGELLKKSENLLDSDIHPTIIAMGYRKAAEKAQEVLDEIAIDDVDSETLVKVAMTAMTGKGTEAAREPLAKLIVDAVEAVAEDGEVDIDNIKIEKKDGAVVEESTLVEGVIVDKERVHPGMPSEIKDAKIALVNAPLEVKETEVDAEIRITDPAQMQAFIEQEEKMVKDMVDQIVAAGANVLFAQKGIDDLAQHYLSKAGVLAVRRVKKSDIQKLSRATGANVITNLDDLTAEDLGQAGIVEERKVSGEEMIFVEECSGAKSVTLFVRGSTKHIVDEIVRAIEDAIGVVAATVEDDKVVAGGGAPEIAMAKKLKDYAESISGREQLAVNAFAEALEVVPKTLAENAGLDSIDSLVDLRAAQETSHYMGLDVFTGEVADMKEAGVIEPKRVKKQAIQSASEAAEMILRIDDVIASTKGPEDAGMDPSAMGGMPPMM

SEQ ID NO: 10894 - protein, 72 aa, Methanobrevibacter gottschalkii
MENLSFEESLEKLERIVNNLENGNVPLDNAIDEFNNAMKLVKICNEKLNAAEESIAKIVKENGELVEFNPTE

SEQ ID NO: 10895 - protein, 418 aa, Methanobrevibacter gottschalkii
MEKETITVSQINSYINRKLKTDPNLKNILIKGEISNYKSSFSGHSYFTLKDEKSQIDAVMFKGNKDRFLKFEPENGMKVIVKGKIEVYEKTGKYQLYATKITEDGIGNLHLAYEQLKKKLDKEGLFDNAHKKEIPKYPKIIGVVTAQSGAAIRDIITTIKKRYPVSNILVFSTLVQGDQAAQQIVKQIKYAQEFNIDTLIVGRGGGSIEDLWPFNEEIVAHAIYNCKIPIISAVGHEIDYTISDFVADKRAPTPTGAAVLAVPDINEVKNNLNNLSNRANKNITNRIKQNKTKLTHISEKQILKNPESIYEIKGMGLDNIVNKLHFISKNIINSNKTKLFKLENSIVLKNPIEITKSKRDACLRNIEKLEILNPLLTLKRGYTLAKTNDKVVSSAKDVKTGDQLDIEFDDGIVNTKVI

SEQ ID NO: 10896 - protein, 76 aa, Methanobrevibacter gottschalkii
MRIKEELFGKEVLDAEIQIVGKVNDVIFDKDTFEITDLVIKKTGLSEQIKASENIVPIELVKVIGDKILLKGEDDI

SEQ ID NO: 10897 - protein, 175 aa, Methanobrevibacter gottschalkii
MVSREYLINLLKDNNVFLEGDFTLSSGQKSNYYINMKKAITEPEILSTISKLITSKIDLDDIDKVAGPALGAVPIATAVSLESKIPLLMIRKEKKGYGTSKLIEGELNEGDNVIVVEDVSTTGGSLLKAIKAINDNGGNVIRAFVVVDRQEGAIEKFEKEGIKLEPLINVNEFFD

SEQ ID NO: 10898 - protein, 168 aa, Methanobrevibacter gottschalkii
MKSKTTIEHQKMSSNDITCGVITLSDSRKSKKVDLSGQYMAEEIEARYTLKSRSLIPDEKEDLINTIETMIDDDIDVILTTGGTGLDSRDITVETVESLFEKKLDGFGEMFRAKSYDEIGAAALLSRATAGIYKKTVIFSMPGSPNAVKTAFNIIIDEIPHFVHHVKK

SEQ ID NO: 10899 - protein, 112 aa, Methanobrevibacter gottschalkii
MFNTELISKMGKIKDKKLSNLLIGRKGGATTIKITDQILHQPSNANQLSKRLHLDYKTITYHLNIMIDHKYVEKEKITNSYIYYPSKKLYNCIEEYSLIRNFLKIEYERYKK

SEQ ID NO: 10900 - protein, 266 aa, Methanobrevibacter gottschalkii
MTNIQTKKELNEEYKNVKYILTSSMRTKLLLALYEHSKKLEEIRKDLKKPSATILHGLKELENKNLIRKIQKHYELTSNGYILTTNMIKLIENWYSINKSKQFWNKHDLSDIPKEMLKDIYLLKNVEYETSTTSDLSNAFNKYIKLLLKSTELKIILPIYSENHFKHMIDFLNKHEQAKLELIVNEKILNSIKQNKNLERKLLENEKVIVKCIEQDLKLFLTCSDNFMSLTLFLNDGHYDDSQILIGKDKNAIKWALNLIQCFSHN

SEQ ID NO: 10901 - protein, 263 aa, Methanobrevibacter gottschalkii
MDIHNEINNNIKFLAKSEIRLKILSELQNSPNSVHGLVKKTKITYSSVSSNINKLEQNNYIKKIKSKYYLNPMTKIYFQTLMDFKNSVEIITSYSEFWDKHNLNQINIDSLKNITDLKDSKLIETTPLDIYKPHNTIKSQISNSKSLKAIFPYLHPEYPQLIENILKDNGQVELIIPKSISNAITSKIDLKTRKTAIKEKKLTIYPIENNLKIYLTICDKSMSFGLFKNDESFDQNRILISDSEKSQAWADNLFKNIKYDVIK

SEQ ID NO: 10902 - protein, 168 aa, Methanobrevibacter gottschalkii
MEICYILDASAFINGFKLDSNNNFTVPEITAEIKDFESRLMFDMAIDECKLTIQDVPNKYTNCVNKIISESGDILRLSFPDKKLIALAYMFSKEGRNVKVISDDYTIQNTLKIMGIPYSGIITEGIKGIYNWKKVCEGCKKEYDDDYPFDDCEICGSKIYKKRIKVSK

SEQ ID NO: 10903 - protein, 371 aa, Methanobrevibacter gottschalkii
MRIGIVVHGPNIIDSGYALKLIDLLKNYGNISVRLGGTMGRTAVIDASLENIIDITRKLVPSDSLKIFSDEGVDLIFLLNYGKSNVTGQVFGYKVYNHYADKVTENNVPVIQIERPGEEDGSIIPWNNDLDIVHDLSKKLNLAIVYPNEVYENHIKQDNANVNQRIVHGVSPDENIMVNSVVIGKTNSDKLTLIARDNHIVDIIGGELKQHGLEKLGEVDLDSAIVKTGLLRHAKVTPRVISTNKSNDYKITFLDHAGEDVYKFRDSSLVITVGDDTTLISSDILYRFDIPVIGITDGDLDKVVEDGFKVKNSIIFEVERGFDDVVGRDIKRIMFDGAQESFNYLNIEEVRDKIIEIINNINCKYKISYIE

SEQ ID NO: 10904 - protein, 324 aa, Methanobrevibacter gottschalkii
MNFKNLVKEIQEFKGVSRKSSINNVISLLEESYNVSGDVVIEIGDDASAIDIGNNQVMLIAADGIWGDIMNVNPYWAGYCSVLVNVNDIAAMGGKPLAMVNIMSISNDEIYEDLLKGIKDGCLKFGVPMVGGHLHPDGEVDSLGVAIVGIAQKDKIITSFGAEVGDKVIVAIDLDGKPHEMFNLNWDTTYDKDSQLVRDQITAVQYLAEHDYIKSGKDISNPGILGTLEMLLETSKKGAIVNLEDIPRNETLGWADWLRSYPGSGFVFTADEDKCEYIREYLAKYSIEAAVVGEITDSNSLYLNYADEQAEIFNQDKNPVFIFR

SEQ ID NO: 10905 - protein, 246 aa, Methanobrevibacter gottschalkii
MAITKKHVFSLLIILIIALGTISISSAYVGTGFSHDIPTSKYHDLSASDILNKYNTTNCHVEENGVCTKVVDGDTIYLDNGKKIRFVGVNTPERGVEGYITSKNFVQKLCLNKKVGLDIDDSKFTDRYGRTLAVVIVDGKNVNEMLLKEGLAEIMYMPPSEFNPFEWGTTNTHVDTTHSSSSTTHTSTESTSSSDSAKYIGNANTGKFHTAGCSSVNHMSEHNKVFFSSRTDAINQGYTPCEICNP

SEQ ID NO: 10906 - protein, 515 aa, Methanobrevibacter gottschalkii
MLIKINGEEMDVAEASTIQDVIEETNAPYTPGSIVCLIKGKKELEKNISKYKIRTNKGSIVIQLDESDEAKPLVDIWKNQYDEFVDLNIRWSTTTEVAIGPIVTDLEPTSEEYKYYEGDVVLSLSSFSNESTHLILLKDNTTNVYSVPPFNKGIFARVIGGKKTLDNLTDDDSVSSIEPIIERSTTKDIVSVSDLTTVLEEGNELYTYMSFDIDEESPVCVEHLFALIKDGKMKVSYESESFLGFYELASLEKPKEHVTKRNRGTITVRSDGVGVGKLFIYRENRVLSPNHTTVGNVVKGMELIDAAKENEFITVKAEQGRLMLLNKTQAEATEMLSAAGVEHMIDGLVDDNAIIVEQTPQHTIDILKEGKVITKAINKDDLCTIKFTDNAPRSVRYFKLLSGLLENPVGQIKIHFAVPGMHIVIFEGDKKAAKGLVPENNPVDKVIRGQIGITNMASKSAGLIGIRFEDNSDFGPTAETFDATNIIGDITSDYDYLENLKEGVVVYVAESNNES

SEQ ID NO: 10907 - protein, 157 aa, Methanobrevibacter gottschalkii
MLPNLTMSPNLGTEDWDPDVITRMIFIGPGAHVSEQQVVNEFHMLGLPLTIKNTCYGSMISGKSEDVYKAIKEIRKLDPSHIFTKERGFAPGDPRRCRGHRFGPREGFHQMEKEYKILGFVSEALENPKEVEIEEKKPIDVDEFKKIMNKCLDKKNR

SEQ ID NO: 10908 - protein, 151 aa, Methanobrevibacter gottschalkii
MVKIALYPPNSLILADLLERKGHVPLVLQKQIRQKIKDPEIDSPPMNITEEDPLNGLKYAAIEVPSGVRGRMSLIGPLIDEAEAAIIVDGAPYGFGCIGCARTNELSIFLLRNKGIPVLELKYPDNQDETYVMVNAINEFVDSLEETIGEE

SEQ ID NO: 10909 - protein, 413 aa, Methanobrevibacter gottschalkii
MVKIALVSCGTEYSGIQKEIEKAANKFGAEIILPEIDLDYIDESYVKFGFSAQSSSLKLMIARAMAIVEGRCRPDAVFIATCFRCAEAALVRNEVRRFIQNNTRIPVVTYSFTERTKADELFIRMEALATTVTRRNILAREKQEGLTLGLDSGSTTTKAVLMENNNVIGTGWTSTKDIIESANIAAAEAFEGTGYTWDDIDGIGTTGYGRFTMGEKFGAELVQEELSVNAKGAVYLADCQKGEATVLDIGGMDNKVITVNNGIPDNFTMGGICAGASGRFLDMTSRRLDVDITELGPLAVQGDWRNAMLNSYCIVFGIQDLVTTLAAGGSKADVAAAACHSVSEQVYEQQLQEIDIREPLIQVGGTSLISGLVEAVSETLGGIDVIVPEYSQHIGAVGCALLVSGMGHRQDDK

SEQ ID NO: 10910 - protein, 186 aa, Methanobrevibacter gottschalkii
MLVECYDERGAEVYEIIIKQIFQDLVLGSSVDDLKAYVNPDDPVFVLAIKMRKTSNVIKFEDVANLMYNKQNDVTTILIDNENYLPNILKELWKRFSRDEIYQPNRYQLEIKGDFTELGSIVVDDPHSNLRRRIYDAVFRILPEGFKIIKDLSTEDIVTVVATDELIKDAWIEKALEFIDELNKGI

SEQ ID NO: 10911 - protein, 288 aa, Methanobrevibacter gottschalkii
MNEHKGSRFAHITRAHPCFNEKMHDKVGRAHVPVAPKCNIFCNFCTRDINNEEDRPGVTSCIMQPDDAINHINDVTADGPISVVGVAGPGDSLANDETFEFFEKLATEQPDLIKCMSTNGLLLPKYADRLAELGVNSVTVTINAIDPDIAVDIYSFIKYEGKVYKGYEAVEILIKNQLEGVEKAAANGLVVKVNSVLIPGVNDEHIVEIAREVEKRGAALMNILPLIPLGKMKHLQRPDCSMMEKVREEVEEIIPVFRACTQCRADAYGIPGKKSEDHHLGMTPQSHY

SEQ ID NO: 10912 - protein, 306 aa, Methanobrevibacter gottschalkii
MVKTYVFGHKSPDSDSITSSLVMTNLEKELGNTEVQAYRLGNINKETEFILNYLDIDAPELLENIEDDANVILVDHNSPSESVENLENANILKVVDHHKLALKTSYPLFLRFEPVGCTETILCKLYEENNVEITKEMATLMLSAIISDTLLLKSPTTTEDDKKAVTKLSKIAEIDVEEYGLKMLKAGTDLSSFSIEEILALDAKQIDFKNVKSIVNQVNTASIPDVLEMKDELEEGMNKIIEKENLDLFMLLITDIVNSNSQVIALGKNADLVEKSYDIKLEDNMVLLEGVVSRKKQVVPIMTENA

SEQ ID NO: 10913 - protein, 309 aa, Methanobrevibacter gottschalkii
MKTLEWEDNKLKLIDQTKLPDELTYVYCENYQDVIIAIKDMIVRGAPAIGVSAAFGMALADIEGVDLNKAALEIKTARPTAVNLFWAVDRVLNSDDALTEALRMYEEDMATNRAIGKFGSEIIDDGDTVLTHCNAGALACVDYGTALGVFRAAHEQGKNINVICDETRPRGQGASLSVWEMQQENIPVKLIPDVASGFLMSQGKIDKVVIGADRIARGGVVNKVGSFMVALAAKHHDIPFYVAAPYSTFDNDISIFDTVIEERDGDEVRYYGGARICPKNTEVINPAFDITPKELITGIITEKGIIDPI

SEQ ID NO: 10914 - protein, 148 aa, Methanobrevibacter gottschalkii
MNKKIVILVIVVIIAVLLLFLVYANNDSSSNSNRTILNVSSEGPIELSKITDDIKNNSYYEGYDVETLRWMESLGDKYVFKSNDEIVIMDKWDADKIPSAYVCDAYFREIFSCNVLENRTLGDGNHFKDVLFIKNVEFIDEEVHYIQI

SEQ ID NO: 10915 - protein, 332 aa, Methanobrevibacter gottschalkii
MKCVKVPLRQLNDTRIKLMENGLMNMEYKIKTDDKWGYIPVNEYVNDYEIVDVELEAMKKFPHNFAELLKDELSSEEIENLRTSFDTIGDIVILEIPENLQDKKQIIGDAALEFTKRRSIYMKKSAVKGTTRVRDLEFLSGVDDTVTIHKEHSARLKLDVREVYFSPRLATERKRVMESVEDGEKILDMFCGIGPFPIVIAHNKNVDIVAVDINKSAIKYLDENIKLNKLKGNVKTYCGDIRQVSDDFNLKFDRIIMNLPGLAYTFLDVAVDLIEDGGIINYYEFSDSYDRGVKRLTDACSAVGKKVDIINCRKVKSTSPGEWHISIDGKIN

SEQ ID NO: 10916 - protein, 263 aa, Methanobrevibacter gottschalkii
MFYLVGLGLFDEKDISLKGLECLRNVDKIYAEFFTSRLFGSNFNAIEELVGQKIEILVRGEVEEESKFIEEAKTQDVALIMGGDPLIATTHSDFLVQCSKKGIDYEVIHGSSILSSAPAISGLQGYKFGKVTTIPFPDYNFYPKSPYEAIEENLKMDLHTLVLLDIQAHKDRYMTVNQGLEYLMNIHDTLDRDGLINENTLAVGIARVGSKDVCVKAGTINELIDFDFGGPLHCIVIPSKLHIVEAEYLVEIAGANSKLLDIV

SEQ ID NO: 10917 - protein, 171 aa, Methanobrevibacter gottschalkii
MCSIYNIYNCLYKLYLMKFEKTMGFYDSNRMGDILFIFHKNHKKYLNDELSKYNMSLIHALCIIMIHESDELNQKDLSDGLHLTKSAITKAVKKLEDEGWILRERSIEDKRHFILKLTDKGNDFIPIMNDINKKWESEMGLYELDPNFMQIFNELTHRAINLNLKKEMKKD

SEQ ID NO: 10918 - protein, 311 aa, Methanobrevibacter gottschalkii
MSIKKVVVAGGGVLGSQIALQTAYCGFDVTIWLRSEGSIERAQPKLERFKNIYVDTLEKMKTDASAYCRGLSKKADLSSEELDALKEQAQNAYDSLKLTTSYEEAAKDADLIIEAISENPEQKIAFYQELAKHMEDKTILVTNSSTLLPSMFAEYTGRPEKYLSLHFANTIWANNTAEVMGHPGTEQKYYDEVVKFAEDINMIPLKLKKEQPGYILNSLLVPFLNAGQALLANDVADHETIDKTWILATGSPAGPFHILDIVGLETAYNIVIMNPESKDPETTPGKIAKMLKEKIDAGETGINAGKGFYEY

SEQ ID NO: 10919 - protein, 174 aa, Methanobrevibacter gottschalkii
MVRPRRMRRVVECHKYNLNENRKPIELSVDEFEAIRFKDYRNIKQIDAAEFMGISQSTFHRILNSARHKLAISLIEGRRIVVVRGDTMIDQNKYLCNDCGFQWSNPEKTYEKCPDCGSKNIQRLNRDKLRGSSPDKCRCPECGYEEPKVKGVPCRTKICPECGSSLQGRGMCRI

SEQ ID NO: 10920 - protein, 94 aa, Methanobrevibacter gottschalkii
MNDNLKYNCNECGFTWITLNGQHSICPKCHSEKIEYLGEVEDLDINSILEHNKRRGGCCGSARGKGPLTCGKPYPDHHDPNIPHDPSRCCGHNE

SEQ ID NO: 10921 - protein, 76 aa, Methanobrevibacter gottschalkii
MNHVKTVKNETNVAQPHKHTEPSQNTDHKMQKAMNQKMEKNRNIKDEYTKRSSVEEPILENIKRTIPNRKRSSHRK

SEQ ID NO: 10922 - protein, 305 aa, Methanobrevibacter gottschalkii
MDNEELRTVRVYTKKYTSKDKEGNIVEKESQQKQVSLKKEDPFEDNDLVKVLAKREYESLLDNQFSDSKLDEFYNRLEAKDAEIEKLNSQIQTLKGSFFDDVNSLKEQLTYKDELLNAKDEIHKLNKKITKIDDERVAIFKELDYKNKMILAYNVELNKSILNAINVVIDEARDNINRRNAQLVEDLEKSIEKSKHDVNEKNKAIAYEIKSTVEDMNEQIRNTSTLKMILNKKRINLRVPTDDLLKPFDFDFDVEQLLSGQALELDAAEILKEVMPKLPEPFSKYIDTIEEEPETIEVSSTKQGE

SEQ ID NO: 10923 - protein, 138 aa, Methanobrevibacter gottschalkii
MRTFNAGKITFEYPDNWEVEKADILSNPDCIATLSKGQDNLFNAVSFPTATNLDDYKIFMEDVISDDGGVILSSDFVQIADKNAIKVHANMDTPEINFDIHTYVFIENREIYIFELRTLDVSGESEREFKNMISSLRF

SEQ ID NO: 10924 - protein, 247 aa, Methanobrevibacter gottschalkii
MIKKFEIKSHDGPGRIGKVDGELTPRIFFKEELKIAPNQGSAHNIDREIAEFNVKETLKLAKENAETCNIAVIQGSKYIDLRIECLKKLEEIGYNGFIIANGDALLTNSRELVDIIISLKKEAKKTSYFIFPFAELSFMPLLTYMGIDGFLADSANYYSYMNVLQTPTKSYDLNNYPIYENISQKDLEKKNLENMKFVIKEIHVHMKNKSLRNLVEERSGTTPQNISTLKILDKNHMNYLLEYTQIF

SEQ ID NO: 10925 - protein, 316 aa, Methanobrevibacter gottschalkii
MIVRGVFLMSIINRLKSLFKGDIDKEETDINNDVSNTSDDVEVTSSKMEESISPEMEDSKKDLTFKKDIEIVEDSSEIAEEVEAFEKTIPEEQEIVAEEAKTIEDEEKTTDEDVVEEVEENSNDKDKKRDTMTLLTDKELLNDTNRDPDFTAEFIDAGIETVKHCFQCGTCSGSCPSGRRTPYKVRQIVRKCLLGLKEEVIADDALWMCTTCYTCQERCLRSVKIVEIIKKARNIAAHAGYMAKSHKMTGVYVLNTGHAVPINDKIKALRVKIGLPEVPPTTHTYPEALEEVKKLCKITAFDELIGYDEATGGLKE

SEQ ID NO: 10926 - protein, 295 aa, Methanobrevibacter gottschalkii
MEIAYFLGCIMNNRYPGVEKATRKLFEALDIELKDMEGASCCPAPGVFGSFDEETWATVAARNLTLAEDMGVDIVTECNGCFGSLFECNHILKEDEDKKAKINANLAEIGREYKGTTNVKHIAQVLRDDVGFEKLASLIEKPLDLNVAVHYGCHFLKPTETIGIEDQAENPSILDDLVEITGAKSVDYKDKMMCCGAGGGLRSRDLDVTASYTKEKLEHMSEAGVDAIVNVCPFCHMQFDQGQVEVNERYGTDFAIPVFHLAQLYGLAIGLPVEDLTFDAQKIDATSAVKKALGE

SEQ ID NO: 10927 - protein, 88 aa, Methanobrevibacter gottschalkii
MFVATLDGIFKYSDLPEEYEPYVQFKATIDKRELKPTDEMAILNIAGTSTHHVLFLDAYSSIAEIEAELKEADAKINHTTLKIIGGHL

SEQ ID NO: 10928 - protein, 175 aa, Methanobrevibacter gottschalkii
MSLPSEQNWLVLQNLIIDLTKKGYEIPNGINPEMGLIRSSISSYKRDPSHPELINGLAKAEMALNNIQGTLLTIAEEEGENYVDYWLDLLKQVMKGEELFEFAKSRSKFLVNTPPGLTTGKINLKVPLAEERVQEIAEWNGLIIEFEDDMTVQLHGDQEDLKTGLKEMGSFFLDD

SEQ ID NO: 10929 - protein, 229 aa, Methanobrevibacter gottschalkii
MTKILAISDIHGEENENLYTYLGNNDIDLVLILGDITDFGPLDFVETFINKLYEYDVDVIAIPGNCDPQGICNAINDVAFCLHNNIVAYGDAILFGYGGSNPTPFNTPGETDDDHIYKSVYDLLANYDYVYNTEVPKVKILATHAPPFNTDADRVSNGEHVGSSGIQKSIHEFEPEINVCGHIHEAKSLSKIGTTTDVANPGMLKDNGAVLIDIKDGSNYDISIVSLDE

SEQ ID NO: 10930 - protein, 300 aa, Methanobrevibacter gottschalkii
MIWVTSNVDGEEYKEPFSKGIMSRSLNISYIGSKRAYELASEIEEELIKKDMSVISRDELADIVLNHLITVDPKIAEKYKSLRLLRNSKKPLIILIGGSSGVGTSSMAFELANRLRLKNIISTDMIREVMRKIVSKDLSPVIHKSSYDAYESIRTPSLKMDKIVEGFITHADVVNVGIEAIIERSIKEGISIIIEGVHVVPGFISKDLMENNNIIMFTLMIDDEELHKQRFYLRCSQPWVKRSLENYMENFESIRKTQDFFVEQAKIYDSHIINNIEINETINQMVSAILEKFVGVNDVR

SEQ ID NO: 10931 - protein, 128 aa, Methanobrevibacter gottschalkii
MLDKKVKEIMTSDVLTTTSDVDVVFAFEKLMENKISSLPVVEDDELIGIITATDVGHNLILDKYELGTSVKEIMITPVVTVSPDSTIEEAVCIMKDNVSSGILNQLPVVENGKLVGIISDGDIIQEIF

SEQ ID NO: 10932 - protein, 302 aa, Methanobrevibacter gottschalkii
MDELRNKGGKKAVTVAIIANTFLTVFNIIVGMLSGSYALISEGGHTLSDITTTIIAYIGFKIGQKPADKEHPLGHGRAEAISGLIIMLFLTMVAYEIMSGAIEKLFNPSTITTPDIYAAVMAIFGIFINYIISEYIIRLGKQINSPAIVADGKHQKTDIFSSIAILIGVLVSNIGYPILDPIIGLIIGFLILKTAYGIGKENLDNIMGKIPSEKFVNEIRKIANESSDYANNAHNIKVDYLGSYAAVTLHIEIDGNMTLNESHKIVHIVQNNIIERIPDVKYVNVHACPKGLDYNHNQEIDK

SEQ ID NO: 10933 - protein, 373 aa, Methanobrevibacter gottschalkii
MINPASRTKSIELSLIRKMFEVTNPNAINLGIGEPDFDVPENIKNAMKRSIDENDTHYTPNKGYIELREEISKKFKKENDINTNPDDIIVTVGASEGLYMCTQAFVEKGDEVLLPNPSFLSYESCIKLADGNIVPVDCKMENEFKLKAEDVQEKISNKTKAIILNSPSNPTGAVMEKEDIKAIADLSIDENFLIISDEIYEKIIYGKKNYSPAKYSDNVITLNGFSKTYAMTGLRIGYLATTNENYTEQLLKIHQYNIACANTTAQRGAYEALTGPQDEVEKMVFEFQKRRDLIIRRLNEMEYETVNAEGAFYVFPKIEDEDFVMKAADAGVITVPGIAFGTNGKNHVRMSYANSYENIEKAMNILEERVVNG

SEQ ID NO: 10934 - protein, 516 aa, Methanobrevibacter gottschalkii
MLYEKNIFQKNIKNMNIHMGLAYPNIYRTAMSSLGYNILYNKINERENTWCERIIFPNTNSIESNTPSKYFNIISFTVQFEEDYFNVLKMLKDAEIPLKREDRSESDPLIIAGGPCVTANPMPLYDYIDIFVIGEGEFVIDEILNTYKKHGKNLEKYLGLLGVYIPKYNNRTKINIIPNMDNTYHITEHIVSKSDDENYQTIFNNTIMLNVSRGCTRGCRFCMSGYLYRPMRETKYKKLIDIAIKNRENTGLNKITLIGAAVSDYSDLKNLIDGLEKEGFQISTPSLRIESITKETLESLKRSGLKTITLALESTEKLRKVINKEILEEKIFTVIKNAIELDFKIKLYFLIGIPGETMEDIEELCQYMKKIANMHKSIKNVKFSVNPLIPKPHTPLQWEPYDFKDIKKKTRYINKEMRKYNVKCESPKKGLIQYILSCGNRSIGAIIEKTLTKNPTLKEWKELLPKYDIDDVLPWDNIDVGVNKRFLKIENKRLRSLKQTPWCETNPCYNCGSCEK

SEQ ID NO: 10935 - protein, 958 aa, Methanobrevibacter gottschalkii
MFFLVLGVVGATEFNNASNTEDSNLMTDNVDSLSVENKLEVSNEDSISEANLVNSHDDNLNNYSDSDVLSNYEDDYGNVQASNYAEIGNTNSVRSDVLSVSNDDNLAASSKVSAKVDVVDTHYSKSATYFKVTLKDTKGNSISNQKISFKVNGVTYTATTDKNGIASVKTAALSVGTYTVAIKYAGSSKYAAVALSKKVKVLSSVSGSDITKYYGPVVQYSVKFWKNYNALANTKVSFKVNGITYTKTTDKNGVAKLPVNLAPGKYVITTINPYSGEKLSNKCISLRDGTTLTHGSTNTYITPNKKHSFTVTLKSKHGILIKNKNVVFKYNNKKVTVKTNSNGKATLSIPALSKGTYYISYSYSGDKYYSGSSGSGKLYVKNPTTKITSSKLKMQYKDGSKFAVKLTKNGKVLANKKVKLTFNGKTYTEKTNSKGIAYLTVPTVKPATYNIKYQYLTPSYFNYCYGSNKIVVSKQTAKVSAGDLVMNYKDGSVYKVVVKNKFGNPLKNIKVKFTINGKTYTKTTDSNGVAKQSIGLNIGYYSVKTVLSNNYYAHGAIYKHISVKGTKFVGGNIHVAVGKTAYYSVKLLDYKNNPIKSTEVTFILDGKKYTATTSSKGVAKVNLGVLSAGTHNVKYSQGEYSGSSNIYVADKVTIKQIIAASGNVQKYIQKNHRLPSTVNIGGVTYSTNQYLYLVSKAIVNLKSNVKSAIYVKNVDGPSNPSSTYAAGNLYDYLSVANSVVKNSDSKGSVPNTVSSKVGTIGYKSLVYAFARVVAFYGDDDRLPSFVEIKSLSGTSSDSNINSKNTISNLKAYLAASTNCQVNNAKIKQLVGKLTNGLKSEKSKATAIYNYVRDTISYSFYYDTKHGAVGTLNAKSGNCVDHSHLLAAMFRTAGLATRYVHGSCTFSSGSTYGHVWTQVLIDNTWTVADATSSRNSLGKIANWNTKSYRLNGYYSSLPF

SEQ ID NO: 10936 - protein, 152 aa, Methanobrevibacter gottschalkii
MNSKKYSKVAVGGTFDKFHDGHKKLLTTAFELGNQIEIGVTSDAFGGLKGDIDPCKERMSNLKAFFSDKSDFVVIPLNDPYGTTIYDEDFDAIVVSEETEPTAVEINEIRISKGMKPLDIVVVSFVLAYDGNPISSTRIRRGEINQKGNVVE

SEQ ID NO: 10937 - protein, 63 aa, Methanobrevibacter gottschalkii
MAVKIDSDLCGHIKDCPVQGLCIKLCEQGAIIEKDGDVSIIPENCDDCDLCIQNCPNQAISKV

SEQ ID NO: 10938 - protein, 336 aa, Methanobrevibacter gottschalkii
MFNIERNGEEHRNLSYNDINCVGCGICTDICPTSSLRLGPIVPVARGLIEMDLVSIKEDSCVFCGLCSIACPFDALSMSVDGEYIKNIESYPIWNKESVVDDGECMYCSKCYNICPSDAIIFERNLPNPADLVRGEIEINEEDCIYCSFCADMCPAEAITIKNIPISSVDKLNNFIDVDSSKCIFCGVCKKVCPENAIKQICSTCMLNEEIEVPEITGNVMILEDLCVYCSWCSEVCPVDAIDITKPFDGTLELVESEEKICKGDSCHACQDVCPCNAVSIVDGKSVTDLSFCNLCGACVKACPQDIRILTRTDLNLENINSESWNDILTSILVGK

SEQ ID NO: 10939 - protein, 60 aa, Methanobrevibacter gottschalkii
MFRKRIDSKGQGSAELILIIGGLIVVVLLIASYISNITEKTQTNIQNLLKTERDFLINKI

SEQ ID NO: 10940 - protein, 68 aa, Methanobrevibacter gottschalkii
MKNMKKLIKENSGQGAAEYILLFGGVLVIALLALTIYRSYMETSDVSLKAKDDIIDVRNTILDNRTHV

SEQ ID NO: 10941 - protein, 382 aa, Methanobrevibacter gottschalkii
MGNTIKLVSGFILFVIGVLIAYEASVYNLLDILLIIGLIIAIVGIIMMISHFVESNADRTTNKIKEFLESKESNSSFERKNFTGEEPLKIRHDYNDFDDAEYDDLGIEDYNDSTPSEYYGDSFEDNPNRVLRTVPRQEKELNLDNQLVFTPNYGRPLKVTRTPKKRQSDYFEKEMPPFVVETDKSDEIKRALEEPTPVEKAVNNHTLAPEVKQPRDIKIDINDPESLPVPKSLSSHILCNDSVITSQEAFDQLAIYVNKEIMLEIPSLNELSDRFLSHVPTSYSRVIIDEFDTSDMSYMFLISSLLKQGVHIKTVPKVHTVNLITDDSHAMIISEGQNDMEYGAIYDDRKSISNIRASFEKTWNIASNLDENIIMGSVGGSA

SEQ ID NO: 10942 - protein, 239 aa, Methanobrevibacter gottschalkii
MEIRWLGHSAFEIISDDNVRILIDPFISNNPTCQVPVEELNPDIILLTHGHSDHFGDALEISNSTNAPIACIHEISLFLAKQGIRNISVNIGGSFVYRNIKFTMLEAKHSSDIDMVEEIAPGGTAASFLITFEDGTKIYHCGDTGLFGDMKNIIGAIYKPDVVMIPIGDKFTMGPFEAALASMWMNPKVVIPMHYNTFPPIEQDPAIFANFVSQFNPNIDIVVMNPDEYFEYNPEDYQD

SEQ ID NO: 10943 - protein, 668 aa, Methanobrevibacter gottschalkii
MKSMSNVDIYTISDELNNLLSGARVDKSFQPANDIVVIRFHVPGTGRIDLVMQCGSRIHTSQYPLENPTIPPSFPMLLRKRIKGAHVESIKQHEFDRVIEIKVKKDKYYTIIVELFDKGNIILLDDENNIIQPLKRKQLSARDISSKREYKFPEKRGINPITITEEELKKLFKNAESDVVRTLAMNGLGSLYAEEIIQRANGIIEIDKNTLTSQLTDTQTAEIYKCLKELFDNLKKGAIKPQIVKKDSKEDVIPLDLVKYADFEKTFYKDFNEACDEFYSKKVNSTIKNVKEAAWNKKVNKFEKRLKLQQETLDNFTRTIEESQHKGEVIYSNYSTIENIINVINTAWSNDYSFKEIGKILKKAKKEGMPEAQIYESIDKMGILTLNIDDTALNINPKSTIPENAEIYYEKAKKAKRKTKGAIIAIENTKKQLDDIKSKKDIAMEQVELPKKRIKKDLKWYEKLRWFISSDNILVIGGRDANSNEMVVKKYLEPNDIYLHADIHGASSTAIKLNGNELNDNIIKESGEFAAAFSSAWSMGFTTQDVFWVHPDQVTKTPEAGEFLSKGSFVIRGHRNYIRSARVKLAIGIVDYEGKRIMAGPVEALEAHCDNYVVLKPGFAKKEAIAKKIINKINEDDLLTLDDIIRVLPSGKCDIDEEYHLRKKYEKN

SEQ ID NO: 10944 - protein, 90 aa, Methanobrevibacter gottschalkii
MDITVKVTSIHIVAGIIAALISTGLTLGWFGFKNDIFAFFIAVIILYFVGQACQKIAGDEISGFSQWLWDGIAPFYFTWVIAYTIFAIYL

SEQ ID NO: 10945 - protein, 606 aa, Methanobrevibacter gottschalkii
MSSMSSVAGLSKYIKTLPKTKFSIIGMLIISFLIGSIYYLIDLNPTMGILEDFIAGGLFGLIVFGISSIMSGALNQQTISVVHGINLKIKHSMFLSVLSMTILGIIIIIGCIISQILKIDLFLNSMLFGCVLIYGFGTLVFWATSKVRFVTAAITGLIQPLLILAMYTLITFLFIDTSFIGPAILQITLKAIVAAIIFVMAIYAFIKVIASPFKKNLGIGVLDLLSLFIAHMNEGSNSLEGLFENMSEAIDTIVTFVSFKTENGIKALFISPSVHPGPLGDLGGSNMPTLLANKFDHFTMVAHGPSTHDFNPIAVSEIDKIEESVRNGLKTVEYSSNASRFIRYNVEKANIGVQLFNKGMVILSTFAPDAVDDIEFGVGLTMMAQSRSRCNVEDSIIVDCHNSFTPESGEILPGNSEVFQLIDVIDTINPKQGRYDVKVGCYEDNLESLDKHDGVGDSGIKTMIVEVGNQRTAYVLFDANNMEIGFRQEIIDAVSDLEIDEIEVMTTDTHTVNTLSRGYNPIGIAKRPEIIEYVRISIEEAIKDLEKVEVGTGTEKIENLNTFGPKNSTELISTISSVVAVSKIIAPVLLITALLIAFIWIFFGGL

SEQ ID NO: 10946 - protein, 173 aa, Methanobrevibacter gottschalkii
MERKLNVPIKDENLNELKAGDVVYLTGNILTARDQAHKRIIEQGAPFDISGAALFHAGPIVTKEDENYKMVAIGPTTSMRMNPYQSDVLDMGAKIIIGKGGMDDTVREALVRNNAIYVVATGGCAALYVDAVEKIEGVDWLDLGMPEAIWNLKVKNFGPLIVAMDSEGNSLYD

SEQ ID NO: 10947 - protein, 109 aa, Methanobrevibacter gottschalkii
MADINELAEKKLKSRMTKIRKCNREPEEKAKFSEKLGVSFDVEFHNKNPDKLADGITFITTPEGRILLAEYYYEIPETQEYTSLPIDEKKLKSILEFFDEYKLEFDDSD

SEQ ID NO: 10948 - protein, 384 aa, Methanobrevibacter gottschalkii
MIVNNSLDEVKKRDNALTIIKNLVETKGRSSLFDLTGLAGGFIASSSEISLLETYVGPAIFEDAIQEVGKEHMGGEKVLAVNRTSSGILATILSLVSKDSNVVHYLAELPAHPSIPRSCNLVGANYFETDVFEEFSIPNNTSLVVITGSTMDHKVIDEEEFKQIIEMAHAKDIPVMVDDASGARLRTVVFNQAKACDLGADIAITSTDKLMPGPRGGLMSGRAELIDEIKIKVNQFGLEAQPPAVLAMVNGIKNFKEENLIKSFKRKDELYKLLSLKFSNFKKSPTGVMIYPEGLSSEINVPHKLSDDDLAYVFSFILLRDYGIITIPPVSMPGASATIRFELSSSDAVNLDLNSLGKKIVSAFEKLQDIITNEEKCREIVFNS

SEQ ID NO: 10949 - protein, 305 aa, Methanobrevibacter gottschalkii
MKEEIMNLLKKEGKLSTETIDEIKQVDINDFKNLVEEIGKQKTEHIIADEISKNLNTKYIGKNLYVFNEVKSTNTIAKFLSTNNIADGSVIISEKQTAARGRSGKSWKSPLGGVWLSIVLNPHVDHSKLPLITLATGVAVAKTLEKVGIKNPEIKWPNDILINGKKICGILTEAVAKFNTIENVIIGVGIDANVDIEKFPEELKNGSTTLEIELGRKENENLLIKLFLEEFEKISELFDHEGYEEILKEWRKRSYSIGKIVEVREPFNKYYDGYVLGISREGALVVEKIDGTLEKVISGECIIKN

SEQ ID NO: 10950 - protein, 497 aa, Methanobrevibacter gottschalkii
MFEKVLIANRGEIAIRVMRACRELDIKSVSIYSDADKTSLYTNYADESYPLGNPSPAKSYLNIEKIINIALESGADAIHPGYGFLAENSKFGEECKKNGIKLIGPSGDVINKMGDKITSKALMKKAGVPVIEGTPEGITDIEEAKDIARQIGYPVIVKASAGGGGIGMRAVYEEDELVRAIESTQSVASTNFGDSTVFIEKYLEKPRHIEFQLLADEHGNVIHVGDRECSIQRRHQKLLEEAPSPIMTEELRDEMGGSAVKAAEYIGYTSAGTVEFLYDNGQYYFLEMNTRIQVEHPITELVTNTDLIKQQILIANGDELSYEQKDIKITGHAIECRINAEDPLNDFAPNPGKITGYRSPGGPGVRLDSGVYMNYTIPTFYDSMISKLIAYGRDRNDAINRMKRALSEYIILGVKTTIPFHKAILRNPNFISGDLNTHFIDTYKKGIEKEMENVIAEDHEYVNRLKSTFMPGKKIAAISAAVGSYQNMARSHNMQKK

SEQ ID NO: 10951 - protein, 275 aa, Methanobrevibacter gottschalkii
MYKDELSIFIPNSFLSESKDLKIRTYKVGILGRALAIFQADNVIIYNDDNVKNEDGEMDGEFIAEILNYMNTPQYLRKKAFPIRSELKHVGILPPLRTPHHPINSQPDVGDYRQGFTVKRNKKGTYVDIGMDKLAFCKEQLSVKRIFDFKITKIAKKEVIVTPDKPDDVYWGYNVISSTKSLKNSLKLIKPDLVVETTRYGDYINSIFDELKSKLNESKSIAILFGGPYSSIQEDVSNPNWDLFKLNTIPGQGTETVRSEEAVVATLSLFNCMRF

SEQ ID NO: 10952 - protein, 336 aa, Methanobrevibacter gottschalkii
MVRHHQPRKGSVAFSPRKRAAKETPRVKSWPQIDEPKLLGLAGYKVGMTHVLMTDSDKNSPTNGMEVFTPVTVLEVPPVVVMGIRAYEKTSRGLKVITEVLADNLDKELSRKISLPKEYNKSEAIAKIQGALENTEEIRVLVHTNPKVTSVPKKKPDIFECGIGGSNPEEKLNTALELLGNEVKASEIFNEGEFVDAIATTKGKGFQGVVKRWGIRIQYGKAVRAGKGRHVGSIGPWTPRRTMWTVAQAGQMGYHKRTEFNKRILKIASADEVDQINPDGGFIKYGLVKNDYVLVKGSLPGPSKRLVILRQPIRPNNKAEDIPQINYISTKSKQGA

SEQ ID NO: 10953 - protein, 254 aa, Methanobrevibacter gottschalkii
MKVNVYSINGEVKEEIELPAIFDEVYRPDLIKRAVLSAQSARVQPWGNDPMAGKRTSAKGWGSGRGTARVPRIKNGSKAAFVPMAVGGRKAHPTRAEKNHHEKINIKERRFAIRSAVAATTNKEIVENRGHKVADLEQVPIIVEDEIEAVKTAKQTREIFQNLGVYDDILRAKEGKRIRAGRGKTRGRKYKKVKGPLVVVGENKGIHLGARNHAGVDVVVAENLNAELLAPGTHAGRLTIYTKSAVEKLGGLFQ

SEQ ID NO: 10954 - protein, 86 aa, Methanobrevibacter gottschalkii
MNAYSIIIKPHVTEKTMNLIDQNNVITFVVNRESNKSQIKRAFEELYEEKVAKVNTHITTKGVKVAYIKLVEEEMAEELAVRIGVF

SEQ ID NO: 10955 - protein, 241 aa, Methanobrevibacter gottschalkii
MGKRLIHQRRGRGTPAHRVASHRFKDKIRYRSYDALEKEGSIKGKVIDILHDPARTAPIAEVKFENGEKKYILAPESIQINDEIECGISAPIKFGNTLPLAEIPEGTPIYDIENTPGDGGRFVRSSGTYASVVTHDANQAVVELPSGELKYLNPNCRASIGVVAGGGRKDKPFLKAGKRWHAYKAKGKKFMTVRGVAMNAVDHPHGGGNRQHPGRPTTVSRHAPPGRKVGSIAAKRTGLKR

SEQ ID NO: 10956 - protein, 136 aa, Methanobrevibacter gottschalkii
MARKIFKYKGYTLEELQQMSLEEVMELFPARQRRSLKRGFLPRQQIVLDKMRKLNKEGTKDGRPVVIRTHCRDMIVIPEMVGTTFGIYDGQNFVEVTIAPEMIGHYFGEYAPTRKRVQHGDPGMGATRSSMFVPLK

SEQ ID NO: 10957 - protein, 154 aa, Methanobrevibacter gottschalkii
MANKYAYNEEVDEAKTARAMAKSLKISPKHSVEICSAIRGMDVGKAKDYLEDVIEMKKAVPFKRHNKKVGHRKGLKGWASGRYPVKAAEQILKVLENAEANAEYKGMDTEKLFIEHISSHKGVVIPGYIPRAFGRMTPFNTPTTHIQIVLQEAN

SEQ ID NO: 10958 - protein, 251 aa, Methanobrevibacter gottschalkii
MIEKDFVTEGLKRTRIDEYLEKELERAGYGGMDVQITPLGTMVVVYAERPGMVIGRGGKNVRAITNTLKTDFGLDNPQIEVKEVEVPELNPKIMAYKISNMLQRGMHFRRVAYSTIRRIMGAGAQGVEVTISGKIRGSRSAVAKFVEGYIKKCGEPSIRLVEEGFATAQLKPGVLGIYVRIMPPETVLPDSVEILPPKIIIEEDGEVTEEEIDIETEEVIEEDIIEEVEDLDELEEVVEEESTEEVEEDDS

SEQ ID NO: 10959 - protein, 68 aa, Methanobrevibacter gottschalkii
MAILRSKEIWDMEVDEIQDKLVELRAELSKNISKSAAAGINENPGKIRELKRTIARVLTIMNEKQKEN

SEQ ID NO: 10960 - protein, 112 aa, Methanobrevibacter gottschalkii
MSKICDVCGLPEELCVCEEIAREVQSLKVFTVRRRFGKLMTIIEGIDEHDIDIRELTKTLKAKCACGGTAKNGQIELQGDHKVKVKKVLSDMGFSSDTIEIRESKKNNKKRR

SEQ ID NO: 10961 - protein, 92 aa, Methanobrevibacter gottschalkii
MITSNNLVHHEFIGLRIHAMNPKNPSLNLKGTVIDETKNTIIIEEEDNNEKMIPKNGTFFVFELPNGEKIKIDGNILSIRPEDRIKKRFKKI

SEQ ID NO: 10962 - protein, 105 aa, Methanobrevibacter gottschalkii
MVGLNVQEPETTCNDPNCPFHGTLSVRGQVLEGIVVSNKAERTITVERSYYKFIKKYERYEKRKSKINVHKPDCLNVNVGDSVKIAECRPLSKTKHFVLVEVKGE

SEQ ID NO: 10963 - protein, 132 aa, Methanobrevibacter gottschalkii
MKPLTSSVTKALPIGATLQCVDNTGAREIEIISVKGFKGVRRRLDVAGVGDLVVASVKKGTADMRREVVNAVVVRQKKEYRRADGLRVKFEDNAAVIITPEGILKGSEIRGPVAKEAADRWPSVGSAANILV

SEQ ID NO: 10964 - protein, 116 aa, Methanobrevibacter gottschalkii
MSIQPRKQRKARYTAPAHARGKYLSASVSKDLREKVGKRSLPVITGDKVRVVRGDFKGHEGEVLTVDYTSYKVTIEEVTLSKPDGTVTFLPVDPSNLVIIDANLKDDRRIKNKGDN

SEQ ID NO: 10965 - protein, 242 aa, Methanobrevibacter gottschalkii
MAKMGSRKHLKRYKAPKSWPIHPKEDTWTVKPSAGSHSINDSIPLTLVIRDVLKLADNAREAKRIINSGNIFINGIIVKDYKFPVGFMDVLDIPKTEESYRVLLDRKGRLQLKLIEDASAKLSKIVNKTTIKGGKTQLNLHDGKNVIIDEDAYSVGDVICLKVPEQEIVEAYPLQEGATILVTGGKHTGELGTVSEIIENKSTNPNTIIIENSAKDEFLTLKEYAFVVGNDAPVIDLLEVNK

SEQ ID NO: 10966 - protein, 170 aa, Methanobrevibacter gottschalkii
MNPMNEVRIEKATVSIGVGEAGEKLSRAITLLENMFDQTPVKTFSKVTNPEWGIRKKQPIACKLTLRGEKADKAIDMVLEGISRNIKPTQFDAQGNLSFGIKEHIDIPGMRYNPDIGIFGMNVSVTFEKPGYRISRRKIQQKKVPQKHRISKEETMKFMEENFKVNYVTE

SEQ ID NO: 10967 - protein, 47 aa, Methanobrevibacter gottschalkii
MPRKYGKAAKKCSRCGDHSAMISRYGLNLCRQCFREIAPKIGFKKYN

SEQ ID NO: 10968 - protein, 130 aa, Methanobrevibacter gottschalkii
MSLMDPLADALTNIRNNELQVNGSCVISPASKLIGQVLSTMQKENYIGNFEYVDDNRAGKFTVELIGNINKCGVIKPRHAVKKDEFEKFEKRYLPAKNFGILIVTTPQGIMTHNEAKERGIGGRLLAYMY

SEQ ID NO: 10969 - protein, 178 aa, Methanobrevibacter gottschalkii
MVVAAAIREEIAIPEGVEVIIENNEVSVKGPNGEDSRKFTYPNVNIKEEENVVILETVFPKKKDKAMIGTTRAHINNMIVGVTDGFTYHMKIVFAHFPMTVKVQKDTVVIDNFLGERHPRTAKIVGSAKVAVKGDEVTITGINKEHVGQTMANLEQATKIKGRDPRVFQDGIYLISRE

SEQ ID NO: 10970 - protein, 109 aa, Methanobrevibacter gottschalkii
MANKRFKRQEYARYKKLGIKWRRPRGKTSKMRRYEAGKPDMPAIGYRTPRAIRDLHPSGFKDVLVHNMQELEDLDPATEAARISASIGKRKKDLMLAKALELGIKVLNK

SEQ ID NO: 10971 - protein, 151 aa, Methanobrevibacter gottschalkii
MNLTTQKRLAASILKVGLNRVWIDPERLEEVSMAITREGVKQLINDGAIKAKPQKGISSYRSKKIKEQKAKGKRKGRGSIKGAKKARTPKKKAWMTTIRALRKDLKEMREDEVIDVTTYRKLYKMAKGGAFRSKSYMRNYARDHDLIKGDE

SEQ ID NO: 10972 - protein, 193 aa, Methanobrevibacter gottschalkii
MAHGTNYKVAFRRRREGKTDYAARMKLVSYDKPRLVVRVSNSHATVQVINYAPEGDLTVASAVSKQLAKYGYLGHTGNLTSFYLTAYLCAKRALAKGVESAILDIGLKSPIKGSKVFAALKGAVDAGLEIPHGDFIFPEDDRINGGHIAAYAESLDAEEVAKKFSKYFERGLNPKDLPANFEETIKNIDEAGE

SEQ ID NO: 10973 - protein, 213 aa, Methanobrevibacter gottschalkii
MSFNIDEWEPKTKLGRLVKDGTITDIDEIFEKGLPIMELEIVDALIPDLEEEVMDVNLVQRMHKSGRKVNFRVIVAVGNKNGYVGLGQGKAKEVGPAIRKAVDNAKYNLIKVRRGCGDWGCVCGREHTVPFKVQGKTSSVSVNLIPAPAGVGLVIGDVGKTILKLAGIHDVWSQSFGQTQTTVNFANAVFAALKELSNVKASQEDLKKMGVNY

SEQ ID NO: 10974 - protein, 152 aa, Methanobrevibacter gottschalkii
MFLVIRVRGTTGVIKNIANTLDMLRLNRISHAVLVEENPSFEGMLQKAKDYITWGEIDAETLSALIAKRGRLPGNVKVTDEYVAENTDYKDIADLAQALIESKVKLADVGIKPVFRLHPPRKGYKDIRLSVQEGGSLGYRGENIKELAKKML

SEQ ID NO: 10975 - protein, 145 aa, Methanobrevibacter gottschalkii
MIRTKRKINKQRGSRSNGGGCTKKRRGAGNKGGKGKAGMGKQHWTWTVIHDPNHFGKHGFKRPQKMINKVNAVNLNYLEEQADKLLANGKASQDGDAIVIDVTELGYDKVLGKGKITKTFKISAPQFSASAVEKIEELGGEAIEL

SEQ ID NO: 10976 - protein, 453 aa, Methanobrevibacter gottschalkii
MSSLEFLEPVFKIVPEVKSPVHREDFNEKLKWTALVLVLYFILTQIPLYGLAPGAIDSFAQLRAVMAGSFGSILTLGIGPIVTASIVLQLLVGSNLLDLDLSSHKDKSHFQATQKILSIVFTFFEASVLVLTGNLVPIDGSYTLILIIQLVVGALVIIYLDEVVSKWGFGSGIGLFIAAGVCQAIIVGTFSILNGSDGLLAGIIPKFIQLATGGTFDFSILVPLIATIIVFVVVLYGEAMKVEIPISHGQVKGHGRIRGSVGKYPLKFVYSSNMPVILTSALLVNVTLFANVFQKIGVPILGHLQNGKAVDGIAWLLSTPNLTMFITEPIHVLVYALFFIACCILFSYLWVEISGLNAKKISEQLHKSGIQIPGFRSSKRQLYKILKKYIPALTIISGVYVGLIAFLADLTGALGGGTGVLLTVGILHKLYEEMAQEQLMSANPVLRKVLGGD

SEQ ID NO: 10977 - protein, 191 aa, Methanobrevibacter gottschalkii
MRGIKLKLVVLTGIPGSGSTTLLNKALEQVDYVHLNYGDIMTEIAINENIADNRDSLRKLPAETQKKIQAKAAKEIKQRSENDNVIVDTHCTINTPAGFLPGLPNWVLEQLQPDLFILIEANADEIIYRRLNDDTRQRDVQKAKEIQLHQEMNRATSMAYATLTGATVKIVENHDNHLDSSVSKLVDVLNL

SEQ ID NO: 10978 - protein, 192 aa, Methanobrevibacter gottschalkii
MFDIMGMIYGVLNTIFDPILAMDPNPSNPALTVLIIAFIVSLITTIANKYLVDQDALNEKQAKMKEFNKELRDAQKRGDGKKIAELQARQTEMMKENTAMMSEQFKPMIVTFVPIILIFFWMRASAIHDLVIILPTTVYWVTLTPLWHVIGSMFYGGQATIPYGIGWLLWYMICTFGMSQILRKFLGFKQGF

SEQ ID NO: 10979 - protein, 88 aa, Methanobrevibacter gottschalkii
MPANRFRSRSYKRVHKKTPGGVNVLRYKKKKPSKHVCAECGAVLHGVPRGRPYEIRKLSKTARRPSRPYGGYLCSACTRKHFKKEARK

SEQ ID NO: 10980 - protein, 173 aa, Methanobrevibacter gottschalkii
MIITIGGLAGTGTTTLAEVLSEKLNVPYISAGFIFREMAAERGMSVLEFSEFAEGNAEIDKEIDKRQAEKAKSSDNLILEGRLSAFFVENADLKICLMTPFEVRSKRIAQREGKSVDVAKNEIIIREESESLRYKEIHNIDIRNMEIYDLIINTDSFNPESISEIITTTLKVI

SEQ ID NO: 10981 - protein, 73 aa, Methanobrevibacter gottschalkii
MASIEVGRVCVKTAGREAGKKCAIVEIIDENFVEVIGEAVKNRRCNVAHLEPTADSIDVSGDAESIKAALADL

SEQ ID NO: 10982 - protein, 321 aa, Methanobrevibacter gottschalkii
MKFNRMVKSKSFTSPDFGCKPEEREISEYISKGVINLDKPSGPTSHEIDSWVKRILSLEKSGHGGTLDPKVTGILPVGLNDATRAIQLLLTAPKEYVCLLTLHQDVPEERIREVFAEFTGKIYQLPPVKSAVKRELRTRNIYYATIYEIDGRDVLFRIGCEAGTYVRTYCHNIGEALGVGAHMAELRRTQVGSFNEKNNLVTLQDVTDAYHFYIEDGDESFLRQAIMPMEMAADYLPKVIVKDSAVDAICHGADLACGGIAELTDNIQKNDIVAILTLKGELVGAGSSLLTSGEILESDSGFAVNVSKVLMKPGTYPRFWK

SEQ ID NO: 10983 - protein, 588 aa, Methanobrevibacter gottschalkii
MNVKNTFVIILLFLILFSTVTFVSADDDRSYSIDQVITDLTVKNNGLLHVEEQYDYSFDGAFNGVYRDIPLKSGESIENIKIHVDGAYATYEESDDDGYKHVKIYLYSDAAHTKGIKDCNVKVYISYDLIGAVTIFNDVSGLQYKLWGEEWDVGANNLKATVHLPGNNGNEYYLTPSEYNDTSSLKGNTITAESSYIPKGEYYELLVLMPVDDFNKSPNAKHVNQNGHDMIMKNLKNTINERDFWNTTYLVLGLLTLISPISAIIVYLKYGREPEVNYDGIYERDLPTNDPPEIVNALIENKISIGHPNIKGFEASIMNLIDRKFITLSSQENIESNTKDLMLTLNNKAGLSASEQIVFDTLNHFSTNNILNLSTLNGQLSSETNGKWFMEKIREWESSVENDMDVSRFFDDRGSSIMNVIGLLGIPFAIALIVLGFITNLNNGLYSIAGGIFLIIFSIVITMSDDDIFGRWTEEGRVYYLKWKNLKNFLEDNSLIKEHPPESIIIWKKYLIYGAALGVADKVYESMKLQVPNISDYDNDGLFMYHYYGGYGMMNMAFSTGEISANPSDSSGFGGSGGGSGGGGGGAF

SEQ ID NO: 10984 - protein, 185 aa, Methanobrevibacter gottschalkii
MDFILTIVIIIVVLFIIVTLIHMYNNLVGLRNRVKNSYAQIDVQLKRRNDLIPNLVETVKGYASHEKGVLEEVTKARNSVMNASSIKETSVADNQLTGALKSLFAVAENYPDLKANSNFQQLQNELSETEDKIAYSRQFYNDVVLKYNNACQQFPSSILARIFGYKIEDYFEAPEAERTVPKVEF

SEQ ID NO: 10985 - protein, 149 aa, Methanobrevibacter gottschalkii
MEDDFKHLVRISRKDVNGNKTIEQALTEIKGVGISLSKTMCRTLDLDLDAKIGYIADEDVLRIEEILENPQKFDIPRWMLNRREDYETGDDIHLIESDLDMTLRDDLNRMKKTRSYKGRRHEVGLPVRGQRTKSTFRKSSSVGVKRSRG

SEQ ID NO: 10986 - protein, 179 aa, Methanobrevibacter gottschalkii
MGQPRKSRKKYNTPPHPWNAERIKNENKLMTKYGLKNKKEIWKADTLVRRYSREARYLLGFSTDQMQEEKLELLGHLARTGILPEGAALEEILDLNVEDILRRRLQTIVYNKGLARTPKEARMFVVHGHIALNGKKINSPSYVVLKGQEDDIGFYRSSPVAKQIEEYNNSKSDKVNTEE

SEQ ID NO: 10987 - protein, 130 aa, Methanobrevibacter gottschalkii
MAKDEKWGIANIYSSFNNTIITVTDITGAETISQWSGGKVVRADRQQASPFAAMAAATRIADDAKEKGFVGLHIKVRAPGGNGPRSPGPGAQATIRALARAGIKIGKIEDITPIPHDGTGRPGGKRGRRV

SEQ ID NO: 10988 - protein, 272 aa, Methanobrevibacter gottschalkii
MEGFNMEIEVKSQKDDEIVFIVRDAEVPFVNAIRRCAMVNVPKIAIEDVNIIRNDSAMFNEVLAHRLGLTPLVSDLDALEGLSLPEDDDWEEYTNGIMFTLKEEGPKVVYSKDLISSDSKIKPVYDTIPLVKLKDNEKLNIESVAKVGYGKDHAKWMPTTVCAYKQYPEITFNDDLEIDYDCASACPRGVLKSDKRSKKIKILDIENCSMCKSCVRASTNGYINVGYRENDFIFRIETDGSMPPKEVLLKACEVLGEKADKFIRFSEEGGSK

SEQ ID NO: 10989 - protein, 121 aa, Methanobrevibacter gottschalkii
MAKKIIKTNPNLIELINKLYEQSRNENAAIWKDVAKRLERSNRRTAEVNLSDIARHAEAGETILVPGKVLSNGNLTEKVDVVALKFSAKAQEKIESAGGECIAIDEIIESNPKGSNIRIME

SEQ ID NO: 10990 - protein, 140 aa, Methanobrevibacter gottschalkii
MIIDGEGCVLGRLASVTSKNLLEGEEVIIINAEKIMLTGNKDWAYAKYKQRVDRASISNPRDLGPKYPRRPDDIFRRTVRGMLPFKKSKGKTAFKGLKAFVGVPAEYADVELTAVPEAEYKNIKKGIELGEISKLLGATF

SEQ ID NO: 10991 - protein, 133 aa, Methanobrevibacter gottschalkii
MVKVIHTSGKRKTAIARGTVREGTGKVRINRIPLELYSPELANLKLQEPLTLAGDLANEVDINIHVIGGGVMGQAEAARMVIAKGLVQWSQDMDLKEKFTQYDRTMLVGDPRRSEPKKYGGPGARARKQKSYR

SEQ ID NO: 10992 - protein, 56 aa, Methanobrevibacter gottschalkii
MIPIRCLSCGKPVSAVFDEYNKRVAAGEKSKDVLDDLGLTRYCCRRMLISHVQTWE

SEQ ID NO: 10993 - protein, 60 aa, Methanobrevibacter gottschalkii
MDVEKKLTRFERARLLGARAIQISMGAKPLVEIKDSLDPIDIAYEELKAGVLPLDVIRYE

SEQ ID NO: 10994 - protein, 414 aa, Methanobrevibacter gottschalkii
MVSIIEDVQVRKILDSRGNPTIEVDVITWNSKGRAAAPSGASTGSYEVVPYPKGGIDEVVSEMEDLIASELIGMDAEDLVTIDEVLKEVDGTDNLSAIGGNTTVAISMAVAKAAAASYNMPLYKYIGGNLVNELPFPLGNMMNGGAHAGINAPDIQEFLVVPVGATNISDAVFANASVHKRLKELIQSKDSNFTGGKGDEGGWVPNISNDAALEIQARACEEVGDELGIEIRPSLDIAASELWNAAEQKYIYAQDGIKRDTGDQIDFVKDIIDTYNMFYVEDPFDESDFGGFSQLTAKVGDKCLICGDDLFVTNKELLAKGIEMKAANAIIIKPNQIGSLSETYATVKLAKENNIVPVVSHRSGETTDETIAHLAVGFSSPLIKTGAIGGERIAKLNELIRIEEELPNPTMNKF

SEQ ID NO: 10995 - protein, 64 aa, Methanobrevibacter gottschalkii
MAKVTIDYDKCDGADCAECSDVCPMEVLVLKGDKIEIVDPSECSYCEVCMDVCPNDCIKIEDDF

SEQ ID NO: 10996 - protein, 200 aa, Methanobrevibacter gottschalkii
MANDELLIDLDNYLAAGLHIGTQQKTSDMEKYIFRVRSDGLYVLDIQKTDERIRQIAKLLAKYDPEDILVVATRQYGQAPVKKFGEITGAKTIPGRFIPGTLTNPNYAKFIEPKVIVVTDPRSDAQAVLESKQNGILVVALCDTENLLSFVDIAVPVNNKGRKAIALVYWLLARQILRERGDIPEDGDLDIDSTDFELKF

SEQ ID NO: 10997 - protein, 282 aa, Methanobrevibacter gottschalkii
MLRQPAVAGSFYPNDAENLKKIIESCFLDKSGVGFIPELNKFNGKDYPINVMVPHAGYQYSGAIASHSYCDIVRNGFPEVFIIISPNHTGLGSEISVFNEGEWITPLGDVEVDNEFANEIISISDIASSDFHAHVHEHSIEVQLPFLQYFSSDFKIVPITMGTQTFATSNDLANAIFEAGNKLSKSYCVIASTDLSHFNNQEKANKVDGFVLEDIEEMNEFKLFEEVVQYNITMCGYGPVMTNISLSKRCGKNSCEILAYQTSGDVTGDFSSVVGYASGVFK

SEQ ID NO: 10998 - protein, 320 aa, Methanobrevibacter gottschalkii
MIAKASAPAKTILFGEHSVVYDEPAIAGAVNKRAYITIKESKSDKSIFRAPDIGFEAELLSKQKKYILTKGKPGIIRYILESLYRAHDHSPIDITLSSNVPIGSGLGSSAAVTVATLAALYRYHNIRFNKKSLAHDAHMVEQAVQGVASPLDTLVSTYGGLVYLSRNKKVEHFKVNFNAPLVVGFTTKHGNTGKMVKDVKNLKNRNPKIINPVITAMGNLTNYAKQAILKKDYNKVGELMNINHGFLDVIGVNTLELSRMVYNAREAGAIGSKTTGAGGGGSIIALCPGKVDEVANAIARDDSILKVRFTRRGVSSRVYK

SEQ ID NO: 10999 - protein, 266 aa, Methanobrevibacter gottschalkii
MIILKIGGSSLTNKDSSKSEVNSDSLKRIALEIKSSLDNSAKELIVVHGAGSFGHPPAKKYKIGEVFDKSEYPQKRIGFCETQNAVKKLNMYVCEAFIEQGLPVVAIPASSFMTATNKRITHGDLDSFNKYLEKGFIPVIYGDVVLDDELEFCVISGDQLIQYLAMNLNPNQVILGTDVDGVYNKNPKTHDDAIFFDKLSSLEELDAFEGTTNVDVTGGMIGKIKELLYLADLGIESKIINAEVEDNIFKVLENEDVKGTVISRGK

SEQ ID NO: 11000 - protein, 348 aa, Methanobrevibacter gottschalkii
MISDRKLEHLLICENYDVSFKNKTNGFEDIELIHNVLPEIDKQEIDLSTSTFGKKLDSPLFITAITGGHPAAKEINKQLAIAAENNNIALGVGSQRAACEHPELEDTYTVVRENAPNCLLVGNIGAPQLNLAEKAVEILDADILAIHLNPLQESIQPEGDLDARGYLDLISQITNSVNIPIIAKETGCGISAESAEALVEAGVDFIDIEGAGGTSWAAVETYRAEDRYLGEIFWDWGIPTAVSTVEVTNAIDVPVISSGGIRSGLEAAKAIALGADAVGMALPFLKNSTSQEQLNKFISRFNESLRIAMFLVGASNIDELKESKLVIRGKTREWLNERGINTKNYSRR

SEQ ID NO: 11001 - protein, 447 aa, Methanobrevibacter gottschalkii
MSVEVIAIGGYQEVGKNMTAVKVGEDVIIFDMGIHLDRISMHEDTDIDRMHSLDLIERGVIPDDTLMKDVDGKVKGIIFSHGHLDHIGAVAKLAHRYDAPLIGTPYTAALIEKQIKGERKFKVNNPIRPLNAGSKLKLSKDITLEFVQSTHSIPQAVFPVLHTPEGIIVYALDFKFDNHQKVSPPPDYKRLRELGREGVLALIVETTNSTNYNEVKTHSERIARNILEDVMRGPLQEKTGMIVTTFSSHVERVQAIADIAKKSHREIFFLGRSMERFCGIAQKLGILKLPKNASIYGSPKAINRALLRADEDRANYLLVTTGHQGEPDALLPRIANGRTPFNIKKGDNVIISAPIIPNPTNAANRHIMERRLKLKGARIYPNAHVSGHAGREDHREFLRMLKPQHIIPAHGDLTMLSAYAELAEEEGYRIGYDIHILRNAQAQVFKS

SEQ ID NO: 11002 - protein, 326 aa, Methanobrevibacter gottschalkii
MSDVKKILGNYSTDITRTIEEELSAITPNNLAEASVYLTRAGGKMLRPALTLIAAEAVGGNRESALKSAAAIELIHTFSLIHDDIMDQDDMRRGMPSVHKVWGDDVAILAGDTLFSKAFEIIIGNKGTTSDQNNKSLATVADACVKICEGQALDMGFEERFDVTEDEYMEMIFKKTGALIAAATKVGAIMGGASEGVIDAMYEYGRLIGLAFQIQDDYLDLVSDEETLGKPIGSDIGKGKMTVIAIKGLASDDTGRLLEILKDDENSNEDITEAIDILTKCGAIEYARNLALESIKQAKEVLEILDDSSSKQMLVDIADFVLERSA

SEQ ID NO: 11003 - protein, 337 aa, Methanobrevibacter gottschalkii
MLEIKHTLCPSCSVGCGINVVLKEGNVVGTFPYKRHPVNSGKNCLNGRNSIECYLNKFEDINVDDVVADVLKELKSADASSVTVVCSGNNDVEEIKAIKEFAESNNFNLAFYADNLKNFDDVATYDDVADASKIFVIGDLLFENPLIGRRIVHAKQNGAKIYALGKTEKSVTFNIADETFNTSVVDFLDANDSNIDESSVIVFNYVDSAEDLDKIESIGCKSFPVFSKSNSKGALDIVEVKSLDEMMELLENTKVLLVFNDDIADEIDFDFTKISKIISFAPCENNTTKISDIVVPIKTWLEKDGSFVNAMGDTQTFTTVIDSDVLSEIEVIEKLNS

SEQ ID NO: 11004 - protein, 380 aa, Methanobrevibacter gottschalkii
MSYVLAKSKDDDILSAGECGGAVTSILKYLLDEKLVDGVLTLRPFDDIYDAMPVYVTDSDDLISTAGSYHCAPTMIGDIIERFIDDDTKIAVTVKPCDMRAMKELIKRHRINDDNVYFIGLNCGGTVSPVSGRKMIDLFYEADPNDVVSEEIDKGKFIIELADGGEEAVKIHDLEAEGYGRRNNCQRCDVKIPRMADIACGNWGAEDGWTFIEINDEKGQKLVDGAKKVGILETKTPNDAAVEGRSKVENIMIKMAKKNQDATYPLVSERDEWSRCIGCYACRDICPVCWCFENCELNKSYFKDEANAFSSPIAFQGVRLSHMSFSCCDCGQCEDVCPMDIPVSLIFDKLQKKYYGRTGYVAGVSEDIKPPLYSPEKTEL

SEQ ID NO: 11005 - protein, 133 aa, Methanobrevibacter gottschalkii
MSEDLKIVGLLCNWCCYGGADTAGTARMQYPSNIRIIRVMCSGRINPSMVFKAFQEGADGVFVGGCHIGDCHYDAGNYKWSRRSKIVEDILEEFGIEKERFRHEWISASEGEKFQTTMEEFHKTLTKLGPLEL

SEQ ID NO: 11006 - protein, 121 aa, Methanobrevibacter gottschalkii
MEIYMQKIGLIRQSLNPKNSSLDLDIDWNIEYVHRNQNEINFDINLRSIENFNLNFKIEGVIVLDLFEIFIQEDVSQIIFHRACNVLMDMISLTRQSSHILSNEDKYPDIGSEHIPKTLYN

SEQ ID NO: 11007 - protein, 338 aa, Methanobrevibacter gottschalkii
MLEIKHTLCPSCSVGCGINVVLKDGDIVGTFPYKRHPVNSGKNCLNGRNSIECYLNKFEDINVDDVVADVLKELKSADASSVTVVCSGNNDVEEIKAIKEFAESNNFNLAFYADNLKNFDDVATYDDVAGASKIFVIGDLLFENPLIGRRIVHAKQNGAKIYALGKSEKSVTFNIADETFNTSVEEFLDKNANEFDDSSVIVFNYVDSVDDLDKINELNCKKLPVFSKSNSKGTLDIVEVKSLDEMMELLENTKVLLVFNDDIADEIDFDFTKISKIISFAPCENNTTKISDIIVPIKTWLEKDGSFVNAMGTCQEFTAVVESDVLSEIEVIEKLNGN

SEQ ID NO: 11008 - protein, 380 aa, Methanobrevibacter gottschalkii
MSYVLAKSKDDDILSAGECGGAITSILKYLLDEKLVDGIFALRPFDDIYDAMPVFITDSEDLISTAGSYHCAPTMIGDIIERFIDDDTKIAVTVKPCDMRAMHELVIRHRINDDNVYFIGLNCGGTVSPVSGRKMIDLFYEADPNDVVSEEIDKGKFIIELADGGEEAVKIHDLEAEGYGRRNNCQRCDVKIPRMADIACGNWGAEDGWTFIEINSEKGQKLVDGAKKVGILETKTPNDAAVEGRSKVENIMIKMAKKNQDATYPLVSEMDEWSRCIGCYACRDICPVCWCFENCELNKSYFKDGTNMPPSPIAFQGVRLSHMSFSCCDCGQCEDVCPMDIPVSLIFDKLQKKYYERTGYVAGVSEDIKPPLYSPEKTEL

SEQ ID NO: 11009 - protein, 134 aa, Methanobrevibacter gottschalkii
MSEDLKIVGLLCNWCCYGGADTAGTARMQYPPNIRIIRVMCSGRINPSMVFKAFQEGADGVFVGGCHIGDCHYDAGNYKWSRRSKIVEDILEEFGIEKERFRHEWISASEGEKFQTTMEEFHKTLTKLGPLELK

SEQ ID NO: 11010 - protein, 551 aa, Methanobrevibacter gottschalkii
MGLENKKFLSALNKKFKGEDQENDHTSFYCFDGWKQSARKREFNEAAEKLAKERNIPFYNPDIGVPLGQRQLMAYKISGTEDYVEGDDLHFCNNSAIQQLVDDIKRTIIVGMDTAHSVLQERLGVEVTPETINEYMENINHALPGGAVVQEHMVEVHPGLVDDCYAKIFTGNDDLADELDKRLLIDINKEFPEEQAEMLKSYVGNKTYQVSRVPTLVVRACDGGTVSRWSAMQIGMSFINAYKLCAGEAAIADFSYAAKHADVIGMGAFLPSRRARGPNEPGGVAFGTLADMVQTSRISDDPCEVSLEVIAAAAALYDQVWLGSYMSGGVGFTQYASAAYTDDILDDFLYYGKDYVEKKYGMCQADLSMDTVRDISTEVTLYGLEQYETPTLLETHFGGSQRASVVSAAAGCSTAFATGNSNAGVNGWYLSMILHKETHSRLGFYGYDLQDQAGASNSLSIRSDEGLIHELRGPNYPNYAMNVGHQPEYAGIAQAPHAARRDAFCTNPLIKIAFADHHLTFDFRHPRKEIAKGALREFMPAGEREIIIPSR

SEQ ID NO: 11011 - protein, 264 aa, Methanobrevibacter gottschalkii
MEYKAQYCPGETIIAENRRKHMNPEHEFKKIRSVSDEGLVKILGHRNPGESYKTVHPPLAEMEDDGDIIKSIIEPTPGAAEGIRVRYIQFADSMYNAPAQPYDRARTYMWRYRGVDTGTLSGRQVIEIREQDLEKISKELVETDIFDPARCGMRGATVHGHSLRLDENGLMFDGLQRYIFNEEDGHVYYIKDQVGRQLDEAIDVGVPLDEEYLKEITTIYREDNIGMRQDKEALEVIENIHTARTEGGYGMGVFFKDLKKKLGE

SEQ ID NO: 11012 - protein, 164 aa, Methanobrevibacter gottschalkii
MDESEQINVIDVKITPYRFLKPKTTEKILNEIYKLKGQQRVLIHGPSIPKKVFYGPGKGHVVNHTDRKEINVKGCDVELRVMVGEIIVTVDMSELKEFMNNLKDILETHMPCDYYILIGVFTRTKTTISDYLKYGNNFENSIDRRYIGLVDSHSKTSETVKVIK

SEQ ID NO: 11013 - protein, 443 aa, Methanobrevibacter gottschalkii
MKIYDDNLDLYGPDGKIIEESVPLESISPLKNSAIQQMIYDIKRSAAVNLVGIEKGLKSGAMGGKSTYIPGRELDLPIVKNAELIATKIKKILQVNEDDDTTVNLINGGQQLLVQLPFERLNVAADYSVSTLQTSAATIQSIIDSFEINMFDASTIKTAVMGAYPRTVDLSGSNISALLGPPVLLEGLGYGLRNIMANHVVAITNKQTLNAAALSSIMEQTAMFETGDATGAFERMHLLTLAYQGLNANNLVFDIVKENGKGTVGTVIQTLVGRAIEDKIIKVAKKMPSGYNMYEPIDWALWNAYAAAGLLAAVIINVGAARAAQAVASTVLYYNDMLEYETGLPGVDYGRTEGVGVGFSFFSHSIYGGGGPGTFHGNHVVTRHAKGTAIPCASAAMCLDAGTQMFSVQRTSALIGTVYGTIDNLRNPIPNVAKIAGEIKDKL

SEQ ID NO: 11014 - protein, 273 aa, Methanobrevibacter gottschalkii
MSCYKYWGKLEEIANKLSSYGDLDKYGDSALDDVDINEIIEILDDVEIIAHDKTIDFDSAKHILDDEKMNKALKLIRKFYVYVGARLETEKAIEMLESDDLDTNLESFEFYDRYVGLLNNESQLAKFNENKTFVFLGSGPLPITLMMFNELFGCKCIGIEQQEDVAELSRKLLKKLGLENEIEIIVGDETTIESLEYDILMVAALAEPKERVFSNIWQYVDEKTPVIYRTYTGMRAILYSPVLDKDTRGFHKEVMILPTGNTNNTSVLIRKIV

SEQ ID NO: 11015 - protein, 261 aa, Methanobrevibacter gottschalkii
MKGILGAICGDIIGSTREFNPIKTKDFKLFKRKSTFTDDTVMTLAIANWLIEDTASESILIKQLQYWGNKYPDSGYGGRFRNWLKEIDPKPYGSWANGSAMRVSPCPWVANSLQESQKLAKLSAIVTHNHPEGIKGALATSDAIYLAKTGAGKEKIKHHIESHYSYDLSRSVDEIRTNYSFDVSCAGSVPESIICFLEGVSFEDTIRNAVSLGGDADTQAAIAGSIASAYWDIPKNISYKSINRLNYDLLNVLVNFEEKFM

SEQ ID NO: 11016 - protein, 260 aa, Methanobrevibacter gottschalkii
MDENIAILKGIGLTMYEAQAYVTLVSLISSNATEISEKSGIPRSKIYDVLKGLIQKNYIDVEDGRPLTYNVKSPVEVLSLEKNRLTTELDDTITRLTNVYENGMSQVQAPIWRIYGVDKIINQELEIITRAKHSINMRIGFLFEEEGEALVKILKKRKNLNINILASPTCCINNKTFNIIKFFKDNDMPVHKADIPFVKVLISDSKEMMHTYTKFSEDKRTVLPETAIGIWNKYEDIARNYDERFMNQLHKIQNKKKKTT

SEQ ID NO: 11017 - protein, 435 aa, Methanobrevibacter gottschalkii
MADGLDMFCYQCSQTAHGTGCTISGVCGKKPTVARLQDNLIFTMKGISAYNYNANVLGKYNPEIDAFLTKGLYTTLTNVNFDAEDLVALALEAGKISVDVMRLLKDAHIEAYGEPQPVEVKVGAQEGPAIIVTGHDLKALEELLKQVEGTDVKVYTHSEMLPAHGYPGLNKYENLVGQLGGAWHDQRTIFKKYNAAIVGTSNCVLPALDAYKERMFTMDVAKLEGVKTIENYDFSEVIECAKSLGSLEPEELTTLTTGWSAGAIVEHADAIKKLVEEGKIRRFFVVGGCDKASKHNNYYREFVQNLPQDTVILTLACGKYKFNDLDLGDIEGIPRLLDLGQCNDTIVAVDVALALCELFDMELNELPLTIVLSWMEQKAAAVLWALLYLGKTDMWLGPILPAWCNEDILNVLVENYNLTPTSGNALVDIKKIMGE

SEQ ID NO: 11018 - protein, 109 aa, Methanobrevibacter gottschalkii
MNEDIKAKSLNIQFLLDYQKDSVVSREIIKKELGTVTFFAFDQGQGLSEHSAPFDAMVQIIDGEAEITISGKKNTVCAGEIIIMPANEPHALQAENCPFKMILTMIKSD

SEQ ID NO: 11019 - protein, 270 aa, Methanobrevibacter gottschalkii
MKQCIDNPNDVDWVNFWAERLKNKKNKDWDKAAPGFYKRTRKDDYQDALFEKLILDENDTVLDVGCGEGSVTIPIAEKVRKVIGIDSSPKMLEYLKKRAIENNINNIETILKPIEDITYDEIGNVDVVICSRSLNGIVPIDKTLSELNKIANKYVFITIFGPENKKIEKDFEKEIGIKTEDFPDYNFFFNILFNLGIYANIERFDLSNYREYDSIKEAMDNGKFRLDLYNDKEKELLEKYLERILTYNRKSKKYYNVKDKADWILIWWRK

SEQ ID NO: 11020 - protein, 339 aa, Methanobrevibacter gottschalkii
MVIKMRLGKTNFKVNKNGFGALPIQRRNEKDSIEILKKAYDNGINFYDSARFYTDSEGKLGKAFEDIRENIYIATKTGTETPEEFWNDLETSLKELKTDYVDLYQFHNISFCPKEDDELYKAMLEAKEEGTVKHIGITTHKITHAHEALDSGLYETLQYPFSYLSGEEELNLVEKCRQLDVGFIAMKGMGGGLIKNSQASFAYMNQFDNVLPIWGIQELEELDEFLSYDANTILTADLKEYIEKDKEELGVNFCRGCGYCMPCPEEINISLCSRMSLWLRRFPTEPSLDEKTQKIMEKTKDCTECYSCVDKCPYELDIPELLKSNYEDYQNVLSGKTKV

SEQ ID NO: 11021 - protein, 334 aa, Methanobrevibacter gottschalkii
MNTDINKAQKYIDDENYKDAIILARKKHSKDDVETYLSILDLLIEADYIIAIEEKGMYYQYYDKTHDNGDYGEKYFDEYLKKQPKSINALCDKAMSRFNKGQIDESLKYMDTAYKNYKNYSKIEKPRISKKELLIAKIELLMQAKRYDDALKYLNNYENQFGGNQKSDLYKGQMLQKNGKNKEALVYLNKSLLEEDTLVGFNAKGDALFDLGRYEDALKEYKNCLNYESKIEGDLELITNFNYKSAFCCVNLGDDGEAIKYLNKTINMLNEHGRLPRNIEAIYQKCSFEKERIMKKGNVTDEEFRKSKFFSTKTSLIILFIIFIFFIILKLNGY

SEQ ID NO: 11022 - protein, 556 aa, Methanobrevibacter gottschalkii
MNDLEKIVFKHALLNAAKHKGSANPGAVMGSIMSNEVELRSKAKEIGSLAGKIVAKVNALSPEEQASEMEKFGVEVQDKKPKTKDSGLQELPGTHENIVLRFAPNPSGPLHIGHSRAAVPNAEYVKRHDGKLILRIEDTDPKRVFEPAYEMIPEDLAWLGIEPNEIVYQSDRFEIYYDYARQLIEKGAAYMCTCDGETFKELKDNCKPCLCRDNSVEENLALWEKFDTMESGEAVLRIKTDINHKNPAIRDWVAMRLVDEEHPRVGTKYRIYPMMNFSVSVDDHLMGMTHVLRGKDHLANSEKQKYLYNHMGWDLPEFIHYGRLKMEDIALSTSKAMAGIEDGTYSGWDDPRLGTLRAIARRGIDPRTIYNLITEIGVKMADSAISWKKIYGLNRNFVEPIANRYFFCEDPVEIKIDGYNDGEVSIERPLHADHIDRGNRILSFDGSAYLAKEDIADGIFRLMDAVNVEIDGNKIIYHSTSFEDAKKVKAKIIQWVPTKDNVNVKIVMDDASAKTGVGEDTLRDLEVGDIVQFERVGFARLDEIKDDKLVFYYAHK

SEQ ID NO: 11023 - protein, 160 aa, Methanobrevibacter gottschalkii
MHISSDKMTMFSNGYSTLRMPEDFEPVNAKDEFNDLYLVNTKIPMSIKFSTTPTLVGLPSIKEDIEKNINDNPRINVILSDFIPINEDIYYLIVSSFSDGEKEIRRNEFLYVEDNNLYIFEFTYPYADRELDDFYLNIIRSFKISVPKYIVEDGNYKLNE

SEQ ID NO: 11024 - protein, 491 aa, Methanobrevibacter gottschalkii
MNGITILIWITIVIIGVIACILVKLHYKGNELEQDEGSIIPSTDKLNGILSQGKEKINSKNLTNSLSSKTTRTQNSQNTKSLYGNKQHTSQDYDVYIVPEVNNKKTYEYESENQVLIDYGDKVKKFQEPIKQSQMDIMNQNKDDKTELKDLFTIDELIKESKRKDNEREKEQPKVEDSELTELKESIAKKQENTIEKSSSEEDIGEFETIESLLNEEELNEDETSEEIETSTTSQKTIEEAISSASQEKKEEIENLSENENITDVLLHADDDQMDIPNEEIKEPTLKTPTKVDESNDSEFNSPLKEDNEETMDLDYRKDLDKFTQKIKGSKLFKDVKEKLTAEPEEYIEEGIPKDETYIRNVKEYDDFEPIINETHADYVDPIGDIEPAFEDNQSLKLENKPKAFEVIKDSSKPEVTQQKIPTIKSKPSRNNIKIKLNNNEVVLKKGDEIIFNHLGETYSSQVYAINGDDISVKYRRQNIIIKPADVKKIY

SEQ ID NO: 11025 - protein, 409 aa, Methanobrevibacter gottschalkii
MVVKINENYLKLKSSYLFVEVARREAEFVKNNPDVDVIKMGIGDVTKPLVPSVVKAFKDAVDEMGSADTFMGYGPEQGYEFLAEAIVKDYEKYGITLDTSEIFISDGAKCDTGNIQEIFGIDNKIAVTDPVYTVYVDTNVMAGRTGEMNDGMYEGLTYLKCNAENGFVPELPSEPVDIIYLCYPNNPTGTTLTKDQLKVFVDYARENKAIILFDAAYEAFINEENVPHSIYEIEGAEEVAIEFKSFSKTAGFTGTRCAFTVVPKQLTAYDSEGNEVEVNPLWNRRQTTKFNGVSYPVQKAAQATYSIEGQKEIQEVIDYYMENAKVICESLSNLGLEVYGGINSPYIWVKAPNNMDSWTFFDLLLNEANVIGTPGSGFGPSGEGYLRLTAFNTLENTKEAMDRISKLEF

SEQ ID NO: 11026 - protein, 230 aa, Methanobrevibacter gottschalkii
MKKIEKPVEIEDGDSFKVILSKYGALALDKQENLAELIGETIGDLDIENEVISFDDIKMPIHVLGFYSQDLNQWSWAWDCEEIFGNNLIASAVEIKKLGDKFDVPEFNSSLIKTDFNFCHTIAMTATTILGFDGYYAVSEDGLDIFVAIESDLVKENNDVKKFRDTFYTFQKNFNIFPKIAFESYTKLKGYGFKPQDGFYLAKIGESRVMAGFTERGNVTRILMFGEDEQ

SEQ ID NO: 11027 - protein, 203 aa, Methanobrevibacter gottschalkii
MNSDIMNQDLVDELEYMEELLTKSGFFDSEEILEILEDQFIDEDIDISQYSVSSNDFSNENFSKLENAFTNLASEKIVAIHNCGYDISEGVNDAFELYVHLHNNKFSVEGFSFYTFEDIEESICECKLKITFGDFENNEEMALKIGKIVFKYLKEENFNIAWDGTINNQIEIYPFKWDKSYDSEKEYEIEGAYEVFIKNQVLK

SEQ ID NO: 11028 - protein, 194 aa, Methanobrevibacter gottschalkii
MNTRSLKLIREVMINSGKWSSIEISQDSIYLQFRDVELGTPKIDEDFSLVVRFADDSFFTVFYNNIWDIDFLSKYDFKNQLLSEEVSFNIKDIKFIDFEYLNTFFTNYKKEKSVSVVEDFNIHNIRNDFFMLLETDEIAIVVGGNQMDFFSPFERLDDASLRELSNDWMLYFLRYHQKRNIVRDPMCENHPLKL

SEQ ID NO: 11029 - protein, 340 aa, Methanobrevibacter gottschalkii
MTCNILVGGAWGDEGKGKCITYLCDNDKPDIIARAGVGPNAGHSVEFNGEKYGLRLTPSGFVHTGAKLMIGAGVLVNPDVLFKEFEDLKKYNVKERMCIDSRCAIINEEHMTRDKGSEHLAKKIGSTGSGCGPANSDRVLRTIELARDIPELEDYITDVSLECNEAIDEGKDVFIEGSQGFALSLYYGSYPYVTSKDTTASTFAADVGVGPTKVDEVINVFKSYISRVGEGPFPTEMTQKEAESHGWEEYGVVTGRRRRIGYFDMDLAKESCRINGATQIALTCVDKLYPDCARTQDYDELSAETKAFIDDIQSATGVPVTIISTGPDLKDTIDLRKELL

SEQ ID NO: 11030 - protein, 164 aa, Methanobrevibacter gottschalkii
MYIRKATLDDLSKIMSIYKIAQDFMIESGNPNQWGHNNPSEEKVKEDIDKKNSYLVCNGEDIHGVFVIFKGIEPTYKHIENGRWLNEDEYITIHRIASDGTQKGIFKFLIDYCKSKSENIRIDTHHDNKIMQKLIERNGFQKCGRIYVTDGSPRIAYQWMNPLH

SEQ ID NO: 11031 - protein, 200 aa, Methanobrevibacter gottschalkii
MTDQYMKPHGEEGLQTIKNMNENHKNISEFAFKCAIIGDNDKILDAGCGGGVNIEKFLKITKNNVDGLDYSEIAVTESIKRNQKAIDDGRCRIIQADVSNMPFKDECYDFISAFETIYFWPNLEETFKEVSRIIKPNGQFMIAQETDGNNPNDETWVNTVEGMRIYTAPELEKYLLNAGFRSVEVFKKEDEYILVVIGKK

SEQ ID NO: 11032 - protein, 312 aa, Methanobrevibacter gottschalkii
MDKKIIAIIVAFIAIVAIGGYFLLGGGSDNVTIGYLPSDHDAALFVADAQGQYAKNGINTKLVQFNNGGDLMTAMASGEVDVGYVGITPVLSSIEKGVPVKVISAAQTEGSGIVVAKNSGINSVFDLEGKKIATPGEASIQHMLLQYYLKQNGIDIKDVKVSAMKVPSMNDALKTNNIDGMITFEPYVSIAEKNGAKVLVDSSEILPNHPCCVVVASDKFLDEHPNETQKILDIHKNATDYINNNTDEAAELLPSDIVSDVDVEKQALAGFPFISGLNDTYKQNVMEFMNLEVELGVLKKPLSEDKIFWNGS

SEQ ID NO: 11033 - protein, 468 aa, Methanobrevibacter gottschalkii
MELINLSKISSEEILAGSFGIEWESLRVKSNGELALTPHPSVFGDKLKNPVVTTDFSESQVEIITPAFDTVDEAFDTFSALSDVVNSSLPEGEYLWFQSLPCILPSPNQIPIAQYSQEGEESQKYRENLASKYGVKKQLISGVHFNFSFDDGFIEKLRKITKSDLSFRQFRDEIYLKITRNYLRYCWLIIYLTGCSIGAHESFSSECINLMDMQDGFGGYYSTKGPSFRNASSGYKNLKKLYPSYNSISEFTRDVTNFIDNGDLSEAKELYTQIRLKPKNPSDVLNSLNETGIEYIEIRTLDINPFYKCGLVKHDMKFLHLFLIYMFVKNESDYPDWQREANINEERVAERAFDESMRLLKDGNEVTLKEWAYDLINEMYGMCDVFDINEYNTLKLMHDRVLNPELTPGKKLLKLIKRDGFINAHMFSAITHKQTSKNLIKNVDKEEYGRLKKYLNIALYRKKSDKNS

SEQ ID NO: 11034 - protein, 348 aa, Methanobrevibacter gottschalkii
MRQYIYNNVPNIKYYNEFKLIDGEKMNKKITFVLVFALAACLAMGSASAGLFDFLGGGDDTVKIGYLPSDHDAALFVADAKGMYKDNNITTELVQFNNGGDLMTAMASGEVDVGYVGITPVLSSIEKNVPVKVISSAQTEGSGIVVTDDSGIKSPADLKGKTIATPGEASIQHALLVYYLNQSDLTVDDLNVSAMKVPSMNDALKTGQIDGIVTFQPYVSIAANQSNAHILENSSEILPNHPCCVVVASDDFIKNHEDQAKTIVKIHENATKFINDNVKAGNADKIVKLLPEDIVSDANLEADSLASFPFISGIDNDFKADVDEFQALEVSIGLLNNTIPQDKIYWEA

SEQ ID NO: 11035 - protein, 208 aa, Methanobrevibacter gottschalkii
MKFDLSEIGIKSGLQYECITTTVNKEGVKNAGAFAFEYLGDDKVKCHIFEGSKTLKNILDTNEYVVNITQNPLVFTYATLDCLGDEYYTDDESIAIIKNTPAYIIVDVENVEIKTPENFPIKGDSNIYFIYGKIRKLVVNDERAAAFNRGMSALIESLVNFSRYKIVDEEKRKEYMDKLIENQRVINKVSDEKTKKAISDLKSEYEKY

SEQ ID NO: 11036 - protein, 124 aa, Methanobrevibacter gottschalkii
MDGEIDLELYTISIIRLNSIFQKIEDKKIVTDIISDINDCFNDLNQIYEDILNELSKEEININEYDPFFENGMVMFPEYTKSIDETIGKIDDENLKVALNSLSDLFVKLIKVGNEYFEKRGAFK

SEQ ID NO: 11037 - protein, 698 aa, Methanobrevibacter gottschalkii
MVDLNKMFKPESVAVIGASNTPGKVGYIIVDNLINDGFKGEIYPINPKGGEILGKKAYANIEDVPGKVDLAIITIPSVFVNAVVKECGEAGVEHMVVITAGFKEVGDEGAKLEAELTAIGKEYGINIIGPNSLGITDSHTPMNGSFSQMMPPTGNMAFISQSGAMMVAIIDWSVTSGIGFSKVISLGNKAGVNEIELLQYLADDDETKVIICYLESISENEDFVRTMRETARKKPIIILKSGSSSAGAAAASSHTGALAGSDLAFDTAFRQSGIIRVDTMAELFDLGLAFSKAPLPRGDHVAIITNAGGGGVVTVDAMEKAGLKLVQFDEETTERLKKCVTEEGSAKNPIDVLGDAPVSRYKESLEIVLSQDEVDSLIVMVCPTASADPDGIANAILEERKEFDKPIIVVNMGGPSFEKANDALRENGVPTYVFPETAVTALKAMTDYAKLEDKSYDDVVENIDDVDKDAVKAIFEKVKADGRDTLLGSEAYAVAEAYGISAAPIKLSTNAEEAASLAEEMEFPVVLKIASDKILHKSDIGGVKVGISSAEEAKSTYDEIIANAKAAHPDIIPDGVEVQKMMDSGEEVIVGMIRDEQFGPMIAFGMGGIYVNLIEDVSFNLAKGMSSQEIDEQINTTKVSQLLAGYRGEAACDVEEVKEAIKRVARLTLDFPEISELDINPIFVYEEGSSALDIKIKL

SEQ ID NO: 11038 - protein, 306 aa, Methanobrevibacter gottschalkii
MSLIIAYIGKKGCVMAADKRRIGYFGDKKNLDLLEEELYEGSIGNDEEFLARASELGISIKITDDANKLKTVGNCIRGEVSTKGTLETKRRRIYGTTNGYQIIELLGSDTKSRNAGENGIVIFGNNFAKQLAHNLISKKLKGSKSLRYMGEVFEDILKEVSSKTPTVGKNIDVLMQQPDFNKTEAQKHLNLTIDHDIKVLTKFRQELTEQIVQQSIEIEMANKIINKGSVGHVVNVDGNMLFIQLNDKTQAMDGNWKQLAAPGQNVLMFSESSNVEIGDEVVIENEELCLKKDKSSLKCDIILCSL

SEQ ID NO: 11039 - protein, 307 aa, Methanobrevibacter gottschalkii
MKITFLGSGGGRFSSISQRRMTGGFRIDNLGGKNYHIDPGPGALVRTYQFGFDPRNLSGIFVSHAHTDHYNDAEILIEAMTKGMTKNNGTILGSVSVLDGYKKWGPCISKYHQSKSRTVILEPGETNEFDSIKVKGTKTQHGDPVGSGFQIDYNGFKISYTSDTGYFDGLAKDHEGADILIASVLRPGEKSIPGHMCSRNFIDLIEEVKPKVAVMTHLGLKMISNNPVVEAKKISKKTGVKTIAAFDGLSFNINYNNPRKFRLISLKDVESSMHSTSHSLFNSGRRNSYQTSFRNKEFDELSIVKRN

SEQ ID NO: 11040 - protein, 366 aa, Methanobrevibacter gottschalkii
MSNSIGEKFKITSFGSSHGFGVGAIVDGCPANLKLTTEDIQKELNKRKPGTSSVTTPRKENDEVQILSGIFEGKTDGTPITGIIFNKNQHSKDYSMFKNTPRPSHGDYSWMVKYGNYDYNGGGRGSGRVTIGHVIGGAIAKKLLKTQKIEIISHVVQIGDIKAKPQDYSTIKKNIEKNPIRCGDLKASKEMEEFILSKKQEGDSVGGIVETIAIGVPQGLGEPVFERLDGDLARILMNIGSVKGVEIGLGFDVATHTGSEINDEYQITNNKITTKTNNSGGIIGGMSNGMPITSRIAVKPTPSISKCQNSINLEKMENEKIEIKGRHDPCICPRVTVVAESSTAIVLADHMIRSGFIHPTNLDKSI

SEQ ID NO: 11041 - protein, 875 aa, Methanobrevibacter gottschalkii
MKRHGLFILILLIVVLAIMNSASAENSSADLISDTQYENSVDIDVADDNLKSYQSVSSDLEDNNEVYNLKLNDNSQVDNTFLKDNASVSDSKIYKLGYDVTHVADKLLNFSSADDILVITTAGMAWIDNKTTESALGGIVDASNNYVSYGKGNILTLSSTRNDPTNIAFFIKKDNSLTMAFYKNGSLTPIFHGNAGPTLSAGEWKKLQKALGDEDAYSYISIANAWSAGMPNDVLTQATYHGHVCTGLISGQAMIQTLLTYYPPKDEFGLPLEHTAYYVLGVPGGSEDDAFTWSLDITPGKRAYIGIDTMVNKAMTGFIRWNTTSNTGIIIIMSYNETAIKESFKKVSGLNPDASATNDLKYQNWLISTLHTNPTSLVTILYEFKGLTKDNLEYLMGLEIGKGNVVKSAHGLDMNYILGLNLTKANREANVNIAEIKLSDAKLKQIGIDACNNAIEYFSSQGITISKDLNNLYVLTSAGYVRINGTPTSMVFDGIYEVLGSALYKKTLFPVHTPIWKDLVFDFYWVDPNNVTNDSSFSLKYDVAKDELIVIGNTTRNANYILQNAIKYDPPYDVLIGWLFHNHVCGGSAPGYLIADYIYENFPTNENESYIYLTTNANCKDDVISRVLGVSPGMGTYYNLRYDNNKTNSTNVGIAIKWNSKTKTGELIIINLDNWGSGAIFKKGSNMYEEYIKLYKKDYSSPNLISRPQISITARKEINEEMLNKIIGGATDTKEGNSIAYIMNLPDKLPINNGENNNKKDNKKTKITGNKKKTDGKHINNSSSSSNSIDSNSPTTGTYGKSNAGLSVGISKNIINANSNSESSDESSGDGKTYEISKKSPNKKINSNNAIFAILAVLVLGGIVGYGYIRKNRGK

SEQ ID NO: 11042 - protein, 159 aa, Methanobrevibacter gottschalkii
MISTVLSVSYAHPGHGHYVDEITSEDVGHSNHPSSDSHDSSGKELSSKSSSNSRIASSHSNSKSNKVSSSDTSNSDLSNKHTSSQSIKSSKGDVEPINSQNEEMPNNTQVKNTSNITNHTITEEAENTNLLTQSNILLFILVAIVGFCIVVLFDKFKNR

SEQ ID NO: 11043 - protein, 334 aa, Methanobrevibacter gottschalkii
MEFPTTRLRRLRKNAKIRDIVRETKLLKEDLIYPIYFKEDLQGLEKEEISSLPGEFRYSLDSGVEFAKELESKGLKSIIVFGIPKEETKDEIASPDYSATGIVQKAIRRLKNETNLVIISDVCLCQYTSHGHCGLIKENEDTDDGIEILNDESLPYIAKVALSHAEAGADIVAPSDMMDGRIKSIRETLDENGYYNVMIMAYSAKYASAFYEPFRVAACSSPHLGDRKSYQMDPGNAVEAIRECELDVVEGCDFLMVKPALPYLDVVRMVRDEFMLPLVAYNVSGEYAMIMAAIEKGFLTERAITESLLSIKRAGADLIITNFAPYLLLNDVIE

SEQ ID NO: 11044 - protein, 293 aa, Methanobrevibacter gottschalkii
MNASEIAKIAQIASALEVSGYPKPGNVHRIRDYDDMEFEDFVISGIVIGDTIREACDDVDVKNPKLGKYILQAVSETDKWIKNNTNLGIVMMIIPIAVAAAISNSFDEIRDNIKVLMKNTSVDDACDLYDAINIADAGGMGDQDEYDVASDNAKKGLKENKQTMYDVLKISAPWDMLAREMTSDMPAVFEIGYPTYHELSKKKSKNETCILTFLTLLSQVPDTLISRKYGSDEALKISMMTRDLLNLKNESDFKDKLKEFDDFLFKNKYNPGTTADLTAASIFVSYLKDNFMI

SEQ ID NO: 11045 - protein, 107 aa, Methanobrevibacter gottschalkii
MEIEYNKHATYPPLIEDLVNELLKDDFVHFKILCANEVHHFNKSDNSIIKFETTYVKETCENGDMLYIAYPDIFRVKLYRDATQYIKDKEKIDAFNDVDWTGNRIIF

SEQ ID NO: 11046 - protein, 514 aa, Methanobrevibacter gottschalkii
MSEDIKKTINELHIYEKKLLKELEASANANPEKIAEKTGMDIKAVMSAAGSLASKDIIEVDKEVEEVISLSDVGLEFVQDKLPERKILDVLIEKKEIHMKDLTDISGLDKKESNIAIGWLRRKNWAQIDKGVVKLTDDGIAFKDKLGDDEELLNILSETKNIIKENLSGDLIDGFNKLNERKNILNIKKNTSHSFKLLDKGEAILKQGFTIQKQATQLTHQQLKDGEWKNLQYRPYDINAEAPIVFAGKKHPLRVIIDEIREIFLNMGFSEDNGQYVESAFWNFDSLFQPQDHAAREMQDTFYLKNPLTCDLPDMDLVKRTAETHETGAGTGSVGWQYDWSEDIARQSVLRTHTTGISTKHLFEHEPPIKMFSVGRVFRRETFDYKHLPEFHQVEGLVCDEGISFQNLLGTLKEFYKKLGFEVRFRPAYFPYTYLSTETEIYLEEKESWIELGGAGMFRPEVLKPLGINQPALAFGLGIERLAMIRYDVEDIRMLYKSDIKWLRELPIDRGVEL

SEQ ID NO: 11047 - protein, 257 aa, Methanobrevibacter gottschalkii
MSIKLVSWNVNGIRALSKKEEFWEWFDNTDADIINFQEVRSTKEQIPEKLADVEGFHKSFNEAEKKGYSGVGTYSKIEPVDVVKGLGIEELDGEGRVLRIEYPNFILYNIYFPNSGTGAKRLDFKVEFCNALLKQIVDLKNKGKNVVVTGDYNIAHNPIDVYNPKNCEGKSGYLPEERSWLDELENAGFVDTFRMFDEGENNFTWWSYRTRARERNAGWRLDYFYVNEEIKGNVKSAKILNEVFGSDHCPVTLELDF

SEQ ID NO: 11048 - protein, 231 aa, Methanobrevibacter gottschalkii
MINNDNDRVVFFDIDGTLLDTSNFAETARKAAIGLMVDNGLPLDKDEAYGVLKTIIREKGSNYNKHFNILTQVVLGHEDPMLVALGMVTYHNVKMALLRPFAETIDTLIYLKSRGYRLAVISNGITIKQWEKLVRLNVYSFFDAVITSEEVGKEKPDNLIYDVALRKMRGNPEKSVMIGNKLKEDGLGAVNAGMSAILVNSDVTEEDREFIKKNKLDIKIIENIGDVDTIL

SEQ ID NO: 11049 - protein, 227 aa, Methanobrevibacter gottschalkii
MVSETKEQLELEAEIKEQAQIFLKYLNSTLPESMELEYEGFYRRGFFVSKKRYAVIEDGEIIAKGLELVRRDWAPIVKKTQEAVLMAILKEGDADKAINEVKKVLKNIKKGNVDKKEMIIHTQITKPLDQYKQVGPHVIAARKIEEHGIKVSRGTIIQYIIVKGKGSISQRAVPYEYSEGYTYDKNYYINNQLIPAIERIMYSFGYTKRDLEDMAKGEVQQSLDAFF

SEQ ID NO: 11050 - protein, 114 aa, Methanobrevibacter gottschalkii
MKKRLISSYDEINDIFVGKVDGENGFYADFDISDGIFLGINKDNCPNSIYVSDASRVLNVSKQTLENSDVKITVSCDSTCLYFSMFIGNLHICSYRCKNIFKIPFIDFEMDSNY

SEQ ID NO: 11051 - protein, 91 aa, Methanobrevibacter gottschalkii
MDNPKINVNSEDEIVIVVPKDVDEDELVIDLDELGIDIEQLGDEVNIVIQVEGDDELESDFITDEDFILEPNEWYFDDDPYGIVYYEFPEE

SEQ ID NO: 11052 - protein, 76 aa, Methanobrevibacter gottschalkii
MDKEIPYYVLDENGQIGSINEPYIDDGDLKELLLSILGDDIPQEEIQKILDASADEKLTEDEFDKLVDEFILKNKK

SEQ ID NO: 11053 - protein, 124 aa, Methanobrevibacter gottschalkii
MAISQGKSTRSPSGARNVANRGKRKSELGRDPAETRLDAKRLRKIRTRGGNEKLRLATGNRINVTDADGKTKVLDILNVVENTANPNYVRRNIITKGAIVETAEGKAKVTSRPGQDGVINGILI

SEQ ID NO: 11054 - protein, 459 aa, Methanobrevibacter gottschalkii
MKLKKSDYIIIISFIASFIAAFISAAPAVALPQLANEFNLNNIMQNWVVNIFLFTVAITAVPLGKFSGKNGIKKTLNLGLILFLIGTIITTFANSYITLLIFRAIQAIGTAMIYNTQTSIVVLAVEEKNRGKALGIIISGVYIGLAIAPFISGILTYNFGWRTIFYFTIPFTLLALFLSLYKVKDEWNMYEDESYDKFGSILYMIGIFFFIYGFTILNQTKGVIFTVIGIVLLIGFAVIDLKIKNPIFDLKLFKNKRFSSSNIASLISYIATFVVTYILNYHFQYILSLNSQTTGILLVVTPVIMAIISPFSGKFSDKIDSQKLAAIGMGFVTIAVFILIFLDYSTPLWVIIIAMALQGLGYGIFSSPNTNMIMSSVPQEETPSASVSITVMRVIGQTMSLAMLTIIFSVIMGNVPIIPEYFSLLTKSSQTACIISTLLCFIAVIASLVGIGGKNDLTN

SEQ ID NO: 11055 - protein, 340 aa, Methanobrevibacter gottschalkii
MSEDKISMNHGAGGEVMANLIASTILDNITKKSVNGGISLDALDDGASIPIGEDYELVLTTDGHTIDPLFFPGGDIGRISAAGTINDVSVMGARPLAISNAIIMQEGFPIEDLDRIIKSLNEACEEVDVAVITGDTKVMPQDKLEGIVMVTTGLGIAKKGEVVRDSTLEVGDKIIVTGSLGDHGMSLMSFREGFGFETDLKSDVAPMWNIIKKALEIGGVTAMKDPTRGGFANAINEMASKSGVGVVLEQEAIPIKEEVHAVSEMLGIDPFEVANEGKVVMGVKADKAEAILEAIKNEKYGENAAIIGEVVEGDYVVVNTPIGGERILEAPIADPVPRVC

SEQ ID NO: 11056 - protein, 131 aa, Methanobrevibacter gottschalkii
MVSIFSRRIIAYFVDFFVVSAFMWIVSYLLSLVIGTNNPIYHYFIYLVPILIMIYFVLCEKIVGASVGKSLLYLQVRSQNGAHISWSQAIVRNLTKIYWIPIIFDWGIGKVLKKDRLFNSITKTVVIDELN

SEQ ID NO: 11057 - protein, 149 aa, Methanobrevibacter gottschalkii
MNKKSISVILLIIFSITIIFTTANILINDNTPLENQAGTLKINNKTIHYEKSGKCLEVIDGNTIKVYGIGKVQLTQVGSPSSEAKDFVENNCLGKTVYLDIDDKKVEDEYGRALAIVYTDTVDVNKELINNNLSEISYFTPSEFKKGDI

SEQ ID NO: 11058 - protein, 228 aa, Methanobrevibacter gottschalkii
MEQKNITQYSINYETKQHPSVKGLQIIEGKNNFPISWLNKQGYCEYQLYLEHVKNIKSPTTPEMTHGSEIHKQLEDIFKQESAQVSFEEVIESSKSEASMSRECFVISPKYGIRGHIDEIWMKPEEIVIIDDKPGRTPYKSTMNQVRAYCLAFKDMSGDDRKIKGALRERGTENLFWIEPFTEDVEKEIKFTIDRIHGLFNGSKPFMPTKNPKKCHSCRFKHDCEHAQ

SEQ ID NO: 11059 - protein, 286 aa, Methanobrevibacter gottschalkii
MHYINSKTILSPKNGMNLYRGCTHGCIYCDSRSDIYNMNHRFEDVEVKKNALVLLKNELLKRPQSMIGTGAMTDPYIPLEKHLEYLRKSLNLIYRYGFGFTCITKSDLILRDLDLLKKINEKTKVVVQMTLTTSDDDLCRILEPHVCNTTRRVEVLKILQKHGIPTVVWLTPILPYINDNIENIESILNYCIDAGVKGVICFEMGMTLREGDREYYYKKLDEYFPGLKDKYIEEFGNSYSIPSPNNKQLMSIFNEKTDKHDILNKPDEVFDYISYFPQKSVQSRLI

SEQ ID NO: 11060 - protein, 427 aa, Methanobrevibacter gottschalkii
MNFNELNISDNIKNGLKGMGFTKATPIQEQSIPVTLKGKDVMGQAQTGSGKTVAFAIPIIEKIFIDDKSPQAIVLCPTRELCMQVADEISKVASNIKKLKILSVYGGQPIGRQTRVLKKGVHIVVGTPGRVIDHINRGNLDLNGIESVVLDEADEMLNMGFRDDMEFILKNTPKTRQTLLFSATMPDEIKKIARKYQRNPKFIKVKANKKNSPKITQYSFKCNAKYKFDDMTRLLDVFDVELALIFCNTKKGVNYVAKHLKKRGYSVDGLHGDMTQKMRDKVMNKFRNDNIDILVATDVAARGLDVDNLDVIINYDVPQNPENYIHRIGRTARAGKLGYAFTLVCRDETRRFAAIKKANNTKITEKQIPSYKEVETIKNKLILDKVINCIERGELEDSYINSIKDSMNKKINAQQLAAGLLKMVREN

SEQ ID NO: 11061 - protein, 268 aa, Methanobrevibacter gottschalkii
MMKAFKKRGALTHFQILSEISKQDPHLKQKDLANKLGITIQAVSENIKTLIEQGYISSKDGRSPYKITQKGIEKVKKDAISLRKYSDAVLETMNHYKTIWPAIAREDLQKDDIVGLFMDDGVLYAHKKEENATGIVMDNTKEGMDVALSNLTGTIDVSNGEVTIINVPTIKDGGSKASDLELIKKVYENGTNSGEPIDKIACAGTVSRAIINKLELPLDIEYAAPNATANAARKGLNVLAICVGDMSKAFTRELESEKIKYNVIDGKK

SEQ ID NO: 11062 - protein, 468 aa, Methanobrevibacter gottschalkii
MQIPQLMHEQYRQAKELIENAEDIKVYSHIDCDGICSGAILSTILDRQNKEYEIEFVNLDVLDDIELTHELTIFSDLGSGQKIDAKAQKNQKILILDHHPPLRDLDYKNNKDYTYLEINPNHHGIDGSYYVCGGGLCYFLAKRFGYDDLSWIGVLSAIGDMQNTKTGHFEGLNKIIQQDAIDGGYLEIIKSDINIYGRNTRPLFVALSYFSDVKLPITNNTNETMAILEELGIDEKHNRKTLNELTMEEKGKLFQRLMSMLTQAVPPKYIQYLPQLILGDSYTFLKEDEHSFLRDGSEFSTAMNACGRNHEEQIAMEVLKGDRFVALDELEVVSKIHRTNLAKGISSVAENDETNIIELENLQYFDGTGIAPEIVGTITGMILGYCNWKKPIIGFTQTDSDGLKVSLRCSRLLSYDGIHFGNIIREVASDVGGSGGGHAMACGAYIPIDKKYEFLEEFNNRLDGKLTK

SEQ ID NO: 11063 - protein, 89 aa, Methanobrevibacter gottschalkii
MITVWPQYLNKKLSLNEGRKISKEDCVKDPTINDIERALKRLGLNYELEKDKSYPGKWYEKSGRALVEWDKSKLELIKEISLKIKEIRN

SEQ ID NO: 11064 - protein, 364 aa, Methanobrevibacter gottschalkii
MADYKYVIVGAGLSGLTIAERIANELNEKVLIIEKRDHIGGNVYDFYKDGILIQKYGPHIYHTNYKKVHDYLSKFTEWTDYVHKVLSYVDDKLVPMPICIDTLNKLYDLDLDENSMKEWIEEHKEDIDEIKSSEDVVLKNAGRDIYNKLFKNYTEKQWGTSAANLSPAVISRIPFRFNHDDRYFSDTYQGMPKEGFTKMCENMAKSDNIHIGLNSDYKDYIGKINYEKLVYTGPIDYFYDYKYGELLYRCLNFVYEVLDEDSYQEAGVVNYPNDPYFTRITEFKKLTQQKVGGKTAIMREYPGFNGEKCYPYPTQEYLDKFKLYESEMEKEENVIFAGRLAKYKYYNMDLVVKDALEIFENEIK

SEQ ID NO: 11065 - protein, 367 aa, Methanobrevibacter gottschalkii
MNDKISIILPIFNVGDHLRGGIDSLINQTIGNENLEIIMVNDCSTDGSDKIIDEYAEKYDCCIAIHHEKNSGAAYTPRNTGIDACTGDYIMFLDPDDRYTPDACETLYHAAKKNNADVAFGRFRRIFEYGGKVQKSFSPYIDTLENSYPNETFDTANFLDVPDFIWDNFVERFLYGKTLEVTYPRDVPIDTIHVENIEQEPDLLKMAPAVWSKIYKRELITDNNLRFQPFVSGDDMAFSLEALLKAKGIVFLNNFMCYNYYIRDLPNDKSITNTVNVRLLYELMESYIYCRQCTEGFSKEVQTVSINPHLLHWTNSWKSSPFTKEENKLLLSEVNKLKSIHNTDLKTKILLSSISTAIESKIQIQKE

SEQ ID NO: 11066 - protein, 256 aa, Methanobrevibacter gottschalkii
MSKPVVAITRPEDRAKKACDIVEKLGGEPFLAPTLDLEPVNSKSLKDLIKRKDELDWIIFTSPTTIVSLNKFYPDFLGSLNCKLAVIGNKTGKLAEENGLKVDLIPEDFTAEGLIEEFKERKITNQIIGIPRTLSARPVLPEELEKMGNTVILAEAYKSLFPMDKKAVKELISKIENKEIDAITFTSPLTVENFFKIIENKEKIAKLLSDNILTVCIGPITAKVLKKYNITYIHPDTYTVPDMMELLFKKWREQNE

SEQ ID NO: 11067 - protein, 101 aa, Methanobrevibacter gottschalkii
MHDRIEIAREFANAIKSDKIIKIILFGSVAREDDIEDSDIDILIISNEWEQIDSLITDEVFKVVLDTQELISPHILSEKQFEETKNFNFLTNVLKDGVEIG

SEQ ID NO: 11068 - protein, 120 aa, Methanobrevibacter gottschalkii
MVLKLDECEAFIKKAKSKLTSSRALYEIGQYGDSVGRSYYAMFLSAKALLVRDGYDVSSHKSLIGIFGRDYVKKGDFDSNIAKYLSGTQSLRDNADYDAIDAISKEIAHGRIKQAERFIA

SEQ ID NO: 11069 - protein, 155 aa, Methanobrevibacter gottschalkii
MTNVLIAYFSASGVTKNLAEKIANDNDYDIFEIVPEEIYTPEDLDWTNKQSRSTIEMNDKSFRPPISESCDVGEYETVVIGFPVWWYTAPTIINTFIESVDLTGKKIKIFCTSGGSGVDKCVNDLKATYPELNFTKGIRFTGNVSNAKEWIEQDL

SEQ ID NO: 11070 - protein, 322 aa, Methanobrevibacter gottschalkii
MFSNIGVVGAGAMGTAISQTICDNTQKVSLYARREELVDSINTTRFNKDYFPNIRLKDNIIATNDLNDLKDAEIIFLTLPSSTIREVCSQLKYIISQDCVLVNTAKGLEKGSQKRMSEVIMEETGRPACVLSGPNIAVEMVERTFSSASIACENKQYLEKVEKALSTFRFKVSASCDVIGVEYCGVIKNIIAISQGICEGMKINDNARFSVFTKTYNETKDMIEKFGGNRNTVDDYCGFGDIITASTLNVSRNHTLGVLYGQRIVIDEKASGVLFEGKNTIVIMKKLCKKHNIDCATVDFTYDVIINRINPKKAFEIFWDKL

SEQ ID NO: 11071 - protein, 231 aa, Methanobrevibacter gottschalkii
MICAAILAGGIGSRLKQGKPKQFVNINNKPILVHSVEIFLSVDELDKIIVSSPKECVDKTNDLMDEYFPKNDKIIVIEGGETRNGTILNSIQYMKGQNCEKDSILVTHDASRIFVSKKLIKDSIKYAIEVGAASAAIPATDVIFETEIDGKLTGVPLRKYLCHAQTPQSFNIDKFLDIYEDLSEEEISKLDEAMVLFHLRNADVKLFPGDQNNFKITRPFDIKLAESIFKN

SEQ ID NO: 11072 - protein, 355 aa, Methanobrevibacter gottschalkii
MDNFKCGSMDFKISVIAPVYNAVDSLEIAINSIINQTIGFKNIELILVDDKSNDGSQDIIKKYADKYENVIGIFLKENSGLPGKPRSLGIKYASAPYLMFLDADDEYLPNAFELLYNTIVNEKSDFVMGSHFWNMNGERMKINILHDCNDKSDVININPFLNQRNFILLSYNHVAPWGKIFNKELILKNNISFPEDTLAEDTYFYFKTLINSKKVTLLPNDSLYMYNVFENKDSVIHTHNLSKFNYFLKGFANVMELIKDIPFSKERILISNMGSLLLIFSNLSMKEKKEAVPKIYYFEKSLDEEVVLKRKELILLNKLILKKHFYLAIIISDIYSILYNNEKIKNLYRKWGHKE

SEQ ID NO: 11073 - protein, 332 aa, Methanobrevibacter gottschalkii
MKTKKERIFYYDFLRAFAIIAVIICHVDYFFGPLTSTTQIIVQMTFHDIGRIGVPIFLMISGALLLNREYPDLSQFLKKRFVRIIYPFIFWIILILAQIYYYGGNPTYLWKVFIGEPSITWYFWVLIGIYLFLPILNSFVKEYGEKGLKYFLAIWFSIIILQTFNVYPLWTNLDLSYFAGYVGYPVLGYYLENKEFKLNNEKICILGVITLLISLSCFVYLNYINSTAIHSIYQNIPIVFMGLGLFISIKYADKLNKFKAIKDNFIGKSIISLSICSYGMYFSHVIVTKFLSYYNPHSNLMFPLMFIMIIFLSWLMPYILSKIPYVRTFSGI

SEQ ID NO: 11074 - protein, 360 aa, Methanobrevibacter gottschalkii
MNLTELYYKLPKKIRYSERFILFCIKLAKPFHKKKTHEKEINYTLNYLFKSSDVKIEGTLRNIQLLYAELLRFIDNICKKYNLDYCLAYGTLLGAIRHDGFIPWDDDCDIIMIRNDYNKLIEVLPSEINKHKFLKENIGLTKLVGFRENYFNNVKTLYDEELGHDVYFHDYNKAPKQFDSKYNEKLPNLCKSLFLQIGWLKPMVRLDIFPYDYIEEKSLNHYDKHYRPAKVSFRNFFADDDFSYEKEFNKHFDKLGLTLEKTKYVGEGIDGSDEYVGSYDSSMFFPVKTHKFEGYDLKCPNKSEELLKRWYGESYMSIPQAIVMHGYSEYNSRFFDSIEDMNESFKLAINELKKINDEFE

SEQ ID NO: 11075 - protein, 277 aa, Methanobrevibacter gottschalkii
MFRTKRYDDETLKHLQKVQMCILKYFIKLCEENDLTYFIYGGSLLGTIRHKGFIPWDDDIDVIMFREEFEKLNKIIEKDIDDKYRFINVLNEETYHYTWGRLMLKNTVINEWWADQVDYTQNIFIDVFILDNIPNNSFKRFIHKWVSFSLNQLTMYAFIKYDNQSKLKKILQQTIHYLIKIIPISAYGIKKRCVNSYRKYQNDDCDDICDFPAICQMPIYHKTDWLPPKKAQFEDIEVNIPNNYDKVLTRTYGNYMALPPEESKWSPAPDEIDFGEY

SEQ ID NO: 11076 - protein, 435 aa, Methanobrevibacter gottschalkii
MKSDNPIVYTCFCTDIIHDGHLNLINEAKKYGDVVVGVLCDSEMVKYNRFPLKTTEERIELVKEIPDIKDVIVQNKIMYDDVVSELKPDYIIHGDNWSEESMKVIRRNIISVLDKYGGKLIEVPYTFNEKIQKVDRQMREKLAMPELRRARLRKLLNMIPVVKTIEVHSGLTGLIAEKTVVADDEHIDQFDAMWISSLCDSTEKGKPDIELVDMTSRFRTINDIMEVTTKPIIFDGDTGGIAEHFVYTVRSLERMGVSAVIIEDKIGLKKNSLFGNEVKQTQDEIDHFCEKISAGKNAQLSEDFMIIARIESLILEQGMDDALKRAFAFRDAGADGIMIHSRRKEPDEILEFCDKFRAEDKETPIVVVPSSYNTITEDELKAHGVNIVIYANQLLRAAFPSMQNAAKSILKHHRAHEIDEKLLSIKKIITLIDEL

SEQ ID NO: 11077 - protein, 243 aa, Methanobrevibacter gottschalkii
MSRYAILSDIHGNLFALKEVFKDLSTQKTDYIILLGDLIDYGMQSNEVVEFIRDNLSSKIICNIWGNHEMAILTKDFKHFSSSRGVESAKFTDSILTNDSRSYLNNELVKEGKLDFEICEKQVLAVHGSLTDYYWKAIFPDNLNGNYIDYDIVLSGHSHYPHVFQKFYEVDDPDMRNKKSVLFINPGSVGQPRNHNPNAQYAILDTDLMNIELKSVKYPKYDAMDLYDGNIDDFYRKRLKNGI

SEQ ID NO: 11078 - protein, 334 aa, Methanobrevibacter gottschalkii
MNILYIISGVTGMTGNELVRQLLNQNEDEVKIIGFDNFYASSIDTVSDCINDGRFDFYEYDLNSNDDMDKIEALVLSIKDDFDELVYINCAAVVHTEHFYKVYETYQTNVASMNDFLQQAIRVGAEKYINCSTSEVYSMNSWNEEGGVKESDFITMADAEHSQRTSYATGKLLTEFFMKDSVDNGKIKGCSIRFANVYSKDEKYPKHIIPHIIDSFKNKGEVVLLENSKKNCRTFLNNYDSCSAVIELAKTDSALDGTIYNVATDEEISIIDLAILIAKKMGIDKPVIKFEGYRESDPERRLLSTEKIITRTNWKPIIDLDKGLDECIENYTKN

SEQ ID NO: 11079 - protein, 256 aa, Methanobrevibacter gottschalkii
MKISIITVAGVSSRFNKDISEEEKMLKCIYYEENPKDTLIYKMINKLSYCDKIVVVGGYKYSDLTEYVNKEIPIELQEKIMLVENDRYADLSSGYSLYLGIKESLNNFDGIEELLFVEGDLDIDSESLTKVIDSDKNVLTFNREPIFSNKSVVLYQNENDEYHYLFNSNHGMLILNEPFKAIFNSGQTWKFRDIELLKIANDYFYENCIDDTNLGIIQKYFDSVENKDTIEIIGLEHWVNCNTRADYQYIKEYWGK

SEQ ID NO: 11080 - protein, 393 aa, Methanobrevibacter gottschalkii
MKNLDERLKIVEKHVKDDEITIMIIGLGSVGTYLLDFLVSKNDAAIKLVVVGRNQEKMQSDVNIVRVAGLIREVNKSQIVVEAGVDLNDIDSIQKAISKHNPDFIVNSSRAYPGLKYGSISWSNVRAYGIWTPLSIKFTKNIMEACENVDTDAVVINTSYSDAVIPWLKSAEKAYPDFGSGNLNHLIPRMKFAVANILGVDDFWNVDFNFAAAHFHDVCISKEGQTEGVDLPLKIYYKGDEQDIPHDEIYNACSISMPVDQKRNMMNASSNYRIISAIIDAIRTGENQKIFSPGAFGHIGGYPVIIGYKEGKISAWIDESVFTFDEMDKANRKSLALDGVEDILDATLIYTDDLIKKVEKAFGEDLPKKVKYDEIEKTAEFLIEKIITPQLNK

SEQ ID NO: 11081 - protein, 372 aa, Methanobrevibacter gottschalkii
MKVEDFVDVLDCEFYTGVPDSQLKALCNYLINEYGIDEKHHLIAANEGNCTALAAGYHLATGKVPVVYMQNSGEGNIINPVASLLNDQVYAIPAIFVIGWRGQPGIHDEPQHIYQGKITCDLLDLMDIENFTVSPETSVDELNDVMIKFNNVLKSGKSVAFVILKNALTYDGKTIYENDNELIREEIIEHIVNVSDSDPIVSTTGKASRELFEIRESKNQAHKHDFLTVGSMGHSSSIALGIAINKPDKRVWCIDGDGALLMHMGSMPVVGNVNPDNLIHIVINNGAHETVGGMPTAAAGTDLVAIAKACGYSYAVSVDNIDDLDEELIKVKNMGNLCFIEVLSSIGSRADLGRPTTTALENKKSFMNFLNQ

SEQ ID NO: 11082 - protein, 280 aa, Methanobrevibacter gottschalkii
MKYNEYDDKTLKHLQSLELMILKDFIKICEENNLTYYMYAGSLLGTIRHNGFIPWDDDLDVIMFRDDFEKFKKIFISSQSDKYELLSNETEKDYFHLLSKLMLKNTKFEEDWVNQVDFHIGINMDIFVLDDLANGKFKRNYQLKKSFLYNKLLIMSKIKLNDLPFSTKVITHACYHILNLFGIKPSKINKRCLNFLNKYKNPDAEFVFDISANADEYPQIFRRDDFKSIIKVKFEDIEVNVPVNYDHILKSLYGDYMSLPPKEDRYNHITETLDFGPYEL

SEQ ID NO: 11083 - protein, 495 aa, Methanobrevibacter gottschalkii
MSDKNEWGSNMSFILAMIGSAVGLGNIWRYPYVLYSNGGGAFYIPYIVAILLMGIPFLILEYGVGYNYKSSFAKAIRKINAKWEYLGWFLPVAVFMIMIYYSAILGWDGIYMVLSFFKGWGADPNTYFATTLLQSSDSMNGLFTFIPVIAIAMLAGWVIIWFISHKDLESGLGKVSKILVPLLFLIMVVIVVFSLTLPGSSIGLAELFNPDWSLLTHFEIWMAAFGQIVFSLSLGMSIAFTYASYTKDGSDLITNTISIALANSIFENFAALGVFSILGYMSLQSGTAVADLVTQGTGLVFIAYPTVFNVLGDWALVLGPLFFLTVYLAGLTSILSTIEPLSFSIQNKFGLTRSRTMTILCVVGAVVSMLYATAYGGSLLGYVDTFINQIALLIGVVAECIVFAWIFEAEKLIDFLNARSKTIKLGKWWLGIVKYILPIFVTVIWIGGMVDVVNNGTMDQLIFTIISAAVLLIATLIFTVLPAKTPEWDNAEDRV

SEQ ID NO: 11084 - protein, 122 aa, Methanobrevibacter gottschalkii
MKNYVIILIGVIIALVIVGGAIAYTSMHDDTSDNNNTTIKSCIPNITNATNDAPNATGDDKNTTSSEPYVVSEVVKFNAQQGEGYYREVTYSDGNFRQYDVDTGKLIGSSYDSDQDKLPSME

SEQ ID NO: 11085 - protein, 94 aa, Methanobrevibacter gottschalkii
MIFSELLKHFNIKEEFPPYLLDQSFNEVFLDGELFRIDKNYKIVVKTRQDVVHKMFIKPDDMYPVIILSKLPNGLLNGMKFGHAKDDVIYINKL

SEQ ID NO: 11086 - protein, 242 aa, Methanobrevibacter gottschalkii
MNKKELINSGKVKSVFNTDNDDEVIIEFRDDMTAGDGARKEIMANKGAYNAVISSKIFRVLEENGVATQFIDLPEPNVMVAKKLEMIPIEVIVRNIATGSLVRKYPIEDGTKLNPPIVQMDFKDDEYHDPMLNDSIIKALGIATQEEIDILTEKALRINEILTKFFADSGIILVDYKVEFGKDKDGNILLGDEISPDGCRLWDSETLDMLDKELFRKGKDDEVMTAYMEVYNRIMPEDEKVI

SEQ ID NO: 11087 - protein, 88 aa, Methanobrevibacter gottschalkii
MLFDIEVKISLKRGMLNPEATTIERSLDLLGYKVKNVKTDEIIKFQMEGEDREVIRSNVTDMCERLLCNPVIHDYKINVIPQNMACGK

SEQ ID NO: 11088 - protein, 214 aa, Methanobrevibacter gottschalkii
MKIGVIRFPGTNCDRDVAKACELAGLEPEYVWWSEEKLTDFDGIVIPGGFSYGDFLRAGAMASITPVIDGIKELVKEEKPVLGICNGAQILGEIGLIPGIFITNENPKFNCEWSKLKVATNRTPFTKAFKKDQIIDLPIAHAEGRFYTKDVDLLKDQDQIVLQFEGKNPNGSIEAITSVCDESGLVVAMMPHPERACESIFGSDDGLNFFKGFL

SEQ ID NO: 11089 - protein, 239 aa, Methanobrevibacter gottschalkii
MVVYLIGAGPGDADLITLKAVKALNKADVVLYDYLANEEILAHAPETSQRIYVGKKAGEHYKTQDEINDLIIKQARNNENVVRLKGGDPFVFGRGGEEILALMEHDIKFEVIPGVTSAIGAPTSLGLPVTHRGVATSLTIVTGHEDPTKPESQVHWDYTADTLIILMGIGNIRENTAEIMKYRSADTPVCAIESGTLANQNLVFGTLGDISNKKINTPAILVIGDVVSMYKDIYNYQGD

SEQ ID NO: 11090 - protein, 595 aa, Methanobrevibacter gottschalkii
MCGIVGCILKNDDDVAPILFDCISKLEYRGYDSIGLATYSEDKIHIKKDKGKIKEVDNKLNLSDMPGNYGIAHVRWATHGDPSKLNSHPHVDERRDVAVVHNGIIENYLEIKEKLISEGHVFKSDTDTEVIPHLIEKFTNEGFDLEHAVRKTVDIIHGTYAIAAISINEPDKIVATRKDSPLIVGIGGEGYYLASDSPAILKYARDIIYPEQGEIVILDKNGVVVHDEFDNPVSKEIETINWTPEMAEKEGYNHFMIKEINEQATSVRNTLTQREHIQEIIDDIDEGIQRICFVACGTSYHASLTGKYLIESLAGIPTDVILASEFKYSANTLNDKTLVIFISQSGETADSLKALDVANETSKTLGIVNVAGSSITRRAEYVIQTQAGPEIGVAATKTYVAQLTSIYLFAALLAKNTELLEELEKVPDFIDEALEDIDFIKEISKRYNYARDFFYLGRGYSYPTALEGALKLKEITYIHGEGYAAGELKHGPLALIDEGIPVVVIAPPGDSHRKTMSNLEEVKSRGANVLAIGSADDDALKTKADDIITINPEVNEIIAPLVYVVPLQLIAYYITLEKGHDPDKPKNLAKCVTVE

SEQ ID NO: 11091 - protein, 631 aa, Methanobrevibacter gottschalkii
MFNKKISLILLTLVFMLSISAAVATDTNSTDDVISSDEEAEPPSVVSQDISINEGNDSNPQENYTLKGSDVSMYYNSGSGYEASLSDGNDSVENATINLNINGVDYNKSTDASGKVFLIINLKPGDYVITASYGNLTTENKINVLPVITGNDVSTTYKHSVPYSATFLKSDGSPLSNTYVKFKLNGKTYSKKTNSKGIAKLYVGSKIGTYNIYAMHPNGYSISNKITVKNSIISSNLKKHYRSSKTFKATFYGKNGKLLTGKTIKFYTKGSYFYKKTNSKGVAYIKVISKPGTYKITSINTNTGEKKSNTITVLSTLEAKSMTVFTGTTSKFKVKLYKGENIAKNTKMTVYVDGVKKRVTTNSNGVATVKFKLDKGIYNIKSVDPFTGYVLNKKVTVKLASISAINVNAIEGKEGLFPAKLLQQNGKVASGTYMEMTIDGVKHKVKTDSRGIAGYKFTFKDAGVHTVVCKDLSTGYKVTKKINVVKKGEGKSYDQFGVSEDGKTMLVIGRPSASGETAKYGYTYYKTEVDRTCPICGSNELYWSIFWASGNTDGGTFPETPSRPAHYDEGNLDGIIICMHYTGDDEYCDADWSVFGHNHDGSGRDLKLVSKPVRSSEIEAYLLKSGYYVKV

SEQ ID NO: 11092 - protein, 408 aa, Methanobrevibacter gottschalkii
MSYENSARIINDDIFDLVNECFGQEKTSQNNESRLNFFDTYKNYFVLTDDGSYSINSKEINHKVETLHTSTGAISESFEKFIKPMKFDYTKDIAILDICAGLGYNSSAAIADFIKNSFDSNLKVDMVEISKATFACGLLVPSPIPEHDITKKAIEDELIRLDYATLSLEECEIPENIDINVFVEDARQTVQNLEDNTYDAIFLDPFSQNMTPELFSLEFFKEFKRIIKDNGIVATYTSSAPVRAAFIEAGFYIGLGPIFGRKQGGTLASPNPEMLDYSLPKNDEIRIALSDVGIPFRDPDLNKSSDFILSERSEERHNARHNTKISSAVKTPIFLGDAMENDEKLKRRVERNLIKMNIPSTTSPEAFYIIECEKKYSEKQDRENNSTARILDMKKRLEKVKDGDYTLT

SEQ ID NO: 11093 - protein, 658 aa, Methanobrevibacter gottschalkii
MFEIKAKDNMGRVGVLKTKHGNVKTPALMPVIHPRKQAIDVGKYGADIVITNAYLIYKDEELKQKAIDEGLHKLINFDGPIMTDSGSFQLSVYGDVEITNREVIEFQESIKTDIGTSLDIPTAPFVDREKAESDLKITLERAKEAVEFKKENNIEMLLNSVVQGSTYLDLRQDCARQLSKLDADLYPIGAVVPLMESYHYKDLVDVVMNSMKELSDSVPRHLMGAGHPMIFALCAAMGCDLFDSAAYILYAEDDRFLTTRGTYKLENLHEMPCSCEVCTKYTPDDLRAMPKKQRRDLIAQHNLHVSFAELRRIRQAIYEGSLMELVEERCRAHPALLDAVRQLGMYACDLEKYDPRSKKSAFFYTGPESLGRSEVLRHIQKLMAMPKKRDLILLPPSRKPYSKFISGKLGDFYRYGEEHDIDLDNADFMVVDVPFGLIPLEVDEVYPLSQNSTPKIRDVDAVEFLQEFVDEFSGYYEQVLIHSRVLKDLEIEGENNLVDAEIRYAKDDVKKIKAIADYQFGVGAGEALFDGNINIEKSKKTGKIRHIYDGKTLIVNMRASDSFLVLSKEGARRLHAAMPSLSNRVVVNKDSEPFALDGKSVFCKFVVDCDDNIRSNDEVLIVNEEDELLAYGKALLGACEIKELKTGQAIKTRKGMKK

SEQ ID NO: 11094 - protein, 222 aa, Methanobrevibacter gottschalkii
MVDNDKVNTGHNIEDKELIKNARKPVGELGHQILDRMNKSHESMAQWGVSHFEVKEDSKILDIGCGGGKNIERFAKQISQNGRVVGIDYSEVSVEKSAKLNQKFIDGGIVNVLQGSVSDMPFHDETFDIVTGFETIYFWPDFINDLKEVNRVLKNDGIVFFCNEAVYREGEMEKYDDLVELLDMKIYSEEVLRNSLEKTGFKDFKAYLNDENDWICVTARKI

SEQ ID NO: 11095 - protein, 475 aa, Methanobrevibacter gottschalkii
MANQVKTIFANMSFMLVSQIIASVCAFVWTIVTAWYLGPSDYGVFGAAVSFAALFGIVIDFGLSTYVVRAISTDFANEHKYLDNAISLKLFLSVFYVIAVYLSVLVMGWQPKLVLACVFLAFENVIKSYHAILFTSFQAHEKMKYQAVTNTVINVFTLIFILLVACTDYALVGILMAYIVANALGLFYEVYALRKHIIKPKLSFDFSFYKALLKAGLPFALTGLFYTVYYSIDLVMITQFSTTYATGLYNSAYKLITVLTLFYTIYTSVIFPVMSKLFTDEKDLLNLSFVKSIKYLMLVTIPIAVFTSFYSYQIIAIYGAEYIEAGGVLQILIWTVCFLFVNGACSLVLNASHQEYSVTKIYTIAALFNVVLNLALIPKYSVYGASVATVLSEILILVLELYMLGKINQLPDRHLIHDILRIIFASLVMGTVLYVLDLNIWAAIAVSVVVYFAVIVLIKTVDSEDKLIIRQIINR

SEQ ID NO: 11096 - protein, 345 aa, Methanobrevibacter gottschalkii
MVGIVGYGAYVPSYRIKVEEIAKVWGDDPVALSRGLIVNEKSVPSSDEDTATIAVTAARYALARAQIDPKNIGAVYVGSESHPYAVKPTASIVAEAVCATPKLTAADLEFACKAGTAGIQMSMGLVQSDMVDYALAIGADTSQGAPGDALEYTASAGGAAYIIGNDNTVADIEHTCSYTTDTPDFYRREGEPYPSHGGRFTGEPAYFKHVLSAAEMLFDETNTAAEDYDYACFHQPNGKFYLRAGKKLGFTSEQIERGLLTPNIGNTYSGAVPLALSNILDVAEPGDKIFVISYGSGAGSDGFAITVKDEIEERRELAPKTEDIISKKTYVDYAVYAKFKGKIKM

SEQ ID NO: 11097 - protein, 385 aa, Methanobrevibacter gottschalkii
MRDVAIVGVSQTKFGELWDSSFRDLIAEAGVKALVDAEIDGADIEAMFVGNMSSGLFVEQEHIAALISDHVGLNPIPTTRVEAACASGGLALRQGIMAVASGFHDVVISAGVEKMTDVVDATPAIATASDKEWEAQQGATFPSLYAMIAKRHMYEYGTTREQLAQFSVVNHKNASKNPNAQFPFEITVDKVLNATMVADPLTLFDCSPVSDGAAAVVMVPAEDAKKYTDTPIYVKASAQASGTLTLHDRKDLTTIESTKVASRKAYEMAGVTQKDIDLTEVHDCFSINGLLAVEDLGFAEKGKGGIAIEEGQTEIDGDFPINTSGGLKARGHPLGATGIAQAAEVVWQLRGEAGARQVDGAEIGMTHNIGGTGGTAAVHIFGRDL

SEQ ID NO: 11098 - protein, 307 aa, Methanobrevibacter gottschalkii
MIINTGSRTDIPAFFSKWLLNRIDEGSVCTRNPYNDDIYKYPLDSKIIDCLCFCTKNPKPMIASLDKLDDFRQYWFVTITPYGKDMEPNVPGYKNVMKSFKKLSEHLGIGKVSWRYDPIFISEKYNLDFHIEMFDKMASELGDYTNDCTISFIDLYQKVLRNFPNSKEVTQDEQLIIGREFSKTANEHNIKMKTCVEGTLLDQFGFDSRGCMTQEVIEKAIGKNLKIPKGKYRIRECDCIFGRDIGAYNTCLHGCKYCYANTNMKLVKKNQKLHNSNSPLLIGDVKEGDVVKEVREPSYIDTQQRFI

SEQ ID NO: 11099 - protein, 400 aa, Methanobrevibacter gottschalkii
MIIQRKDYIDKINPFVNKHIIKVLIGARRSGKSTILKQIIDSLIKQGTPKENIVWMNFELSDYFEMDNIKKLEEFISNKTENIDGKIYLFFDEIQIVPQWEKLINSYFAKENYDIYITGSNSKLLSGEFATYLSGRYVELNIYPFSFREYLEYYEITSDFKSHFYRYLEDGGMPSTFDYRGDDKRLILIDLYNSIVLKDIIQRNNVKNVDLLDRIMRFVMYNISQPFSANKIHKRLKQDMVNLSVNTIYNYLKFFENACLIYQVKREDLQGKRILKHDEKYYICDLGFRQAIIGNNQRDITRAIENIVYLELLRRGYEITIGKVDNLEVDFVCKKQNKLIYIQVSYLLASEETIEREFKPLNNISDNYPKYVITMDDADMSHDGIIHLNLIDFLRDNEVI

SEQ ID NO: 11100 - protein, 396 aa, Methanobrevibacter gottschalkii
MDEIASITDTNLTETQFFNRRDEINILSNLLISTEFNSAPTILLTGIRGVGKTALIKKIRNKFEREYLVVDIDLSRSSAYQQKNLTRASMIKIIYDSIIRSSKEFGLKTISNQIEKYFKTKNFKIDKLLSYEHIPIPIFESEDNYERLAEFVMELPQKIYEDNNDKIKGVFIFIDEIQLIKDLGDELNGFLWYMRSFIQTQKNVAYIFCGSMSLKDSLINDLNGNKGAFGGRMLTIEVQPFSKKTTENYIKSMRRNIQLDHGGFERFYKCTRGIPYYINIFAKYLPENLTLSENNISELFKDSIDYLAIHFVYMWSKLTFQEQKIIISLLENPKKRIEVANSLKVTSGSLNRPLNRLLDYDLIEYANDKYQITDPIFGYWLKNSYEKNGIYPFRSI

SEQ ID NO: 11101 - protein, 305 aa, Methanobrevibacter gottschalkii
MPIYNIDGETLTPIKQVKFKNERELQILTEKNLEELFGLKFIATEFQVDNLRIDTLAFNEETNSFVIIEYKNVKNYSVIDQGYSYLSLLLNNKAEFVLKYNLVCNAALSKDEFDFSQTNVMFISPSYTTYQLRSVEFSDIAFELWKVVKYSNGTVLFDKVNNTDTQASIKQITKENTSKDKVNKEIKKYTEEDTLMNKSDDIKSLYDNLKELILSNYDDIEINHWKYYVAIKVNNKMVATVSVLSKSLKTWINLKETELRDSEGKVRNVSNIGHHGVGDYEYVISSEDDLYYFNKLFKQSYDEKI

SEQ ID NO: 11102 - protein, 231 aa, Methanobrevibacter gottschalkii
MKIVTWNANGKFSEKFPAILEKDADIYVIQECENPEIINLKEYSEFSSNYYWVGENQYYGLGIFAKDNVKLELVDLDDKGLRYFIPFTVNDDFNLLGVWTNPDMDGTKTIYYPKEITKYYEEHKDSGFFNEDMIICGDFNCDVRLKGTHAKNVYEVIEKLSECGLVDIYHHLTGENEGEETTPTFYMYRHLDKPYHLDHIFSSSDKVKALEIGDADKWLQLSDHVPLIFKI

SEQ ID NO: 11103 - protein, 483 aa, Methanobrevibacter gottschalkii
MFEKEELITNFIKEELTDVPNILNKELSKNNEKFNSREELDEIKGYMDTFLNEDTSNKIIVLPGLRGVGKTTLVLQAYEYLLKERDIPPSNVLYISFDDLNDLVECSIRQMVEIYLKNIFHANIRNLDEKVFIFVDESQTDKNWALSGKVIYDKSYNIFMIFTGSSALHLERSDELARRMRKKSVTPLNYTQHLKLKYGIDVGSLSDDLRELVFTGNIDNAAASEFEANNLLTNCLDYSSTDWDEYYKFGGFPILFDKKSHREICEDLVEITERVITKDMPQIKEISSENQSNAKRILRYLALQQPGELTQANLANYLKTSTANVNKILDLLEKTHLIFHCEPYGGSAKRVKKSWKYYFAAPSIRHALSAKIGNPLLGTDDYEGLLLENLVASNLFNLSNRQFTNFTVYYDADKKRNVDFLIHKDSENIIPIEVGRGKKKKLQIKHAINRYDCEYGIVVANNYSSLKKDDDVIYISPKTFSFL

SEQ ID NO: 11104 - protein, 479 aa, Methanobrevibacter gottschalkii
MEDVIYNYLIKQLSEVPMILNRRLSYKNIKFNNKNEFDKLRLMIDSFLDGESEERYFVLPGIRGVGKTTILYQCYEYLLKEKNFNSSDLLYISCETTNFAGETDIKKIIEIYLDEIHNTSPALLDRPVFIFIDEAHFDMNWAMNGKTLYDESPYIFLILAGSSSLHLNYNSDAARRLNILPVMPLNYSQHLSLKYNYQTDIGNDLIDLIFTGNIEAAQEKELKIQKDLISLNSYPLNDWNIYLNYGGFPATFNIKFEDIIVSKLWTIISKVITVDMANVFNLNKNNQNLAYKTLVYLASQKPGEISHDKLSNYLDCGKTTINNIINTLEKTQLIFHSEAYGGASKKVKKPWKYNLATPSIRNCINIKFGNSAGSKSEYEGILLENQIASNLFNLNNNNTSFDFNVYYDSQKGGVDFIVKKLFGNAIPIESGIGSKTRRQIKKAMNKYDADYGIVVSNKTDFIEKEDDVIFIPPKTFTFL

SEQ ID NO: 11105 - protein, 151 aa, Methanobrevibacter gottschalkii
MSKLLIDSSFIIALFRKNDGLHQKAIENKDMLNNDCYITDGILAEVMTIIGQKTKDIGLVRTVYNYLKDNFTIIHESEISMYNDNVLSVFEKYNQNSFKVSFIDCSQVIIYNHYNLDYVISLDNGFGLFEEIELKNLSEQKRTIQFIKYNI

SEQ ID NO: 11106 - protein, 80 aa, Methanobrevibacter gottschalkii
MDNILATTTLYKNYQLAIPKVIRSQFKELNSKDTVIDWFINEENEIIIKPRKKVSLEDVIGIIEDDDPRNAVELKRSLYK

SEQ ID NO: 11107 - protein, 39 aa, Methanobrevibacter gottschalkii
MKLVKRNQKLHSPDLPLLIGDVVKEVSEPAILTHNKRLF

SEQ ID NO: 11108 - protein, 412 aa, Methanobrevibacter gottschalkii
MVKRELYLEKIYNFMGKNLIKIITGMRRCGKSYLFKLIIHELKKRGTKDEDILLIDLELPTYNHIKTREQLDEIVVPFIESHENKVYLFFDEIQNVKEWEVSINSYYKLENTDIYITGSNSKLMSAEFATLLTGRYVNIELYPFSFNEFLDYKQELNHPPSITNELNSDLENFFEEYQKYGGIPLTISSQHDKELVLNGIYSSIILNDIVERYEIRNVGLFNRIVKYIIENTGNLISANAVYKYLKHEKLRITKPTIYNYLEYLENAYLIAKASKEDIAGKKEIIGSEKYYLLDTGFYKSQLEEKQRNIDHILENIIFIELKRHGYKITIGKVNDYEIDFICKKNNQKIYIQVTYLLENDETIEREFRPLLMIKDNYPKYVLSMDRTVQPQNGIKHMNIIDFLKNFNHDEIF

SEQ ID NO: 11109 - protein, 395 aa, Methanobrevibacter gottschalkii
MSIVPLHIPINEIDRYFYNRTEDIKKIEYYLNSLEIGISQSLLIRGVRGVGKTFLLQKLKQDSKKNFLVSYIDISRIVGIDDTQLTAQSVLLELLDEMNNTIYDKIHDGKKVTFLLKKLIDKLKIKDFSFSKGIHMAEIPIPATEDNYKKISKFVMEYPQNVVESIDGINGFIIIIDEFQMLKKLKNPESFFWLMRSYSQFQSNVSYVMSGSISQTSDAIEMLNGATGAFGGRMMQINIDPFTKHETKSYFNDRFPEIKFTDDGFNRFYEYTKGIPMYINSFYNALSSHETYDEKSIDYIFLNNMDQILVMWIRIWGTLNKYEKKIICAMLNKENISWSKLERSLDMSPATLTKYIKTLQDKGIIKYHDGNYNFEDLMLKTWLNNEKERTGVYPQ

SEQ ID NO: 11110 - protein, 509 aa, Methanobrevibacter gottschalkii
MTNCIMVQGTSSNAGKSMLVAALCRIYKNRGYKVAPFKSQNMSLNSYTTKENGEIGIAQMLQAEAAMVEPSIHMNPVLLKPKGDFTSNVIIQGKSIGDMDFYDYQHKYHDTALEAIKESFNILKEEYDVIIIEGAGSPAEINMRDQDIANMEIAHLADANVILIADIEMGGVFAAIAGTYVLLDDYDRSRLKATVINKFRGNLDILKPGLDRIEEITGEPVLGVLPYDETLKLPEEDSASLTTHSFAEDKDITIGVIRLPKIANFTDIDPFEYEDDVALKMIDINDNISDVDAIIIPGTRNSTEDMFELRKSGLADQIIKKADEIPIIGICGGLQILGNVIYDDEKRESKHGTVNGLGLLDIESEFSRADKIVTQSEATIPDNLDGIAGAIFKNIAGESITGYEIHEGTSELLSSKALLNVKKGQGNNDEGMIDGACNGNIFATYFHGIFHNYNFRREFLNYIRTKKGLEARYGEDPYETQKDYSLNRLAEIVEENLDMDIIDDLLFSK

SEQ ID NO: 11111 - protein, 659 aa, Methanobrevibacter gottschalkii
MKFEEVEITEDSPQELVAEPVVEKEDHGEETKPMLDYDNIKSSQDIEVPPLLIDQVIGHEDSIETIKKAAKQRRNVLLIGDPGVGKSMLAKGMAQILPHETLKDVLVYPNMEDNNHPLIRTVPAGEGKKIVKATKGSAKSHEEKKTIITMFAIGGILVIGFMYGRLLESIIAAALILLISIQIKPKNSNMSPKLLVNNQDSRFAPFMDATGSHAGALLGDVRHDPYQSGGLGTPAHERVEAGMIHKANRGVLYIDEIGTMSMKTQQELLSAMQEKQYAITGQSENSSGAMVRSQAVPCDFVLVASGNLQVLEGMHIAMRSRIRGYGYEVFMKDYMEDTTENREKLVQFVAQEVKNDGRIPHFATDALDEIIMEAKRRSGKQNALTLRLRDLGGLVRSAGDVAIEKGANLVTAEHVFEAKKYARTLEQQIADRSILQRKDYSMVSAQGGRVGLINGLAVIGDRSGIVSPIAAEAAPTQSKTGGKIIATGKLGEIANESVQNVSALIKKYTNKDISNYDIHVQFIQTYDGVEGDSASVSIATAVISAIEEIPIDQTVALTGSLNVRGDVMPIGGATAKIEAAAEAGMKKVLIPKSNLKDVMIEKKYEDMIEIIPTETLSDVLENILISGSSKDKLIAKMKNLSSKVADKVPQTGLNNPTIN

SEQ ID NO: 11112 - protein, 160 aa, Methanobrevibacter gottschalkii
MNIYETIKNIRASCDNYVDPNLLAFIIDDDNHMGDNNILEIKGYDIRDNDAYEERLFKIHKNENIFLPCGMITFIPVLNECDIFSTKDYSLKLSPEEFDKYCEQEEKLFGILIKKDSTDYKIGQTDVCNCSITASFKEFKKADGKFYKKIEEIIESKIID

SEQ ID NO: 11113 - protein, 301 aa, Methanobrevibacter gottschalkii
MKVKDGIIGLVVGDALGVPVEFYRREDLEKNPVTGMKSYGTYNKPAGTWSDDTSLTIATMASIINKKCIDYSDIMEEFIEWRKNNKYSQEETFDIGITTRNALDSYTPGINPLCGMGGEGDNGNGSLMRILPLAFIGNIDYETIENISSLTHRHERSRIACVLYVEIARSMISNSNLTINEHVKNASAKIIEYYKDSEELSNFKRIFDDDYSKGVSGKGYVISTFEAVIYCLENTNNYKDAVLKAVNLGDDTDTVAAICGGLAGIYYGFDEIPIEWISEIRQIETIIDLCEKYEVACDEYL

SEQ ID NO: 11114 - protein, 169 aa, Methanobrevibacter gottschalkii
MIFKTANLTLRPWQISDAECLYHFAKNPNIGPIAGWPPHESVEDSLNIIQTVFSKKETYAVVIDNVPIGCVGLLFHPDCNHYWGDNSAELGYWIAEEYWGNGYAVEGSEVLIKRAFEDFNINQIYATYRCENTRSKRVLEKLNFKYFDNLTNVNYLGDQFSEIAMVLKK

SEQ ID NO: 11115 - protein, 122 aa, Methanobrevibacter gottschalkii
MTRLCKNCGFENQDDYDFCAKCGTPLVEGLKPNQFRVYRTQDLEINKKALIAAYIATIFLSWSGFFIGLISKNTVFATFTFFGFFMPFFLVQSKHPALKKHGLIMMAISFVGVALSFYVMMH

SEQ ID NO: 11116 - protein, 170 aa, Methanobrevibacter gottschalkii
MKKLNVALIALVLIVVAFLASTIVSPVLIVAEDASEDNGIDMAATIGLTGFNWIYPGNSVNAQGQTLHNVYADYPDNPYGAARDIMSYTYHVTPHIIISINNDAAAAIFGENIIDDIRANDGYNGYAGNDKVSGSMDRGDAVGTAMAENGINIIEIPIQFLIGNISPHFV

SEQ ID NO: 11117 - protein, 305 aa, Methanobrevibacter gottschalkii
MIIGGSSSQDLAASVARELGEELCYVETRKFPDGERYLKINGHVEDEAVTVIQSTGYPQDENLMELLFIIANLKDLGAKKVKVVVPYMGYARQEKRFNPGETISAKIVCDLIQTVGADEFITFNIHEACVLDFFDIPARNLSAMPAIAEYLDKKFFKKEELKPLIVAPDKGAYGFAQEISEIIGCDCTYLTKVRLGPDKVETKIVDVRCDSESENTVNIDSVKGMHAIIVDDIIATGGTIVNAVNILKQYGASAVDVCCVHPILTNNGVTRIYSAGASKIIGTNTLSSDTSRVSIAKSIAQALRE

SEQ ID NO: 11118 - protein, 96 aa, Methanobrevibacter gottschalkii
MDKETIKKELADKSNELLAKYGEQDLVEDISVMNMATKTVFLGSLRVYNYDNAGKIKNDLEKKIKNYGEIAIRDEKIVPCCAPSYIHVSFNVSINK

SEQ ID NO: 11119 - protein, 654 aa, Methanobrevibacter gottschalkii
MKEFKLNSPYKPLGDQPKAINSLAEGIKKGIKEQTLLGVTGSGKTFTMANVIEKVQKPTLVISHNKTLAAQLYEEFKEFFPDNAVEYFVSYYDYYQPEAYVPRTDTFIDKEASINDDIDIMRHSATQSLLSRDDVIVVSSVSCIYGIGSPEDYGEFAFGISVGDIYDRSEILARLVFMQYERNDIEFARGQFRVRGDVIEINPVHGTPPIRIELFGDEIDAISIIDKVTGKKQESLKRYMIFPAKHFVVGQDKMDEALSKITSELDERLSELNAMGKLLEAQRLEQRTRFDIEMLKEMGYCPGIENYSMHLSGRHWGDKPYSLLKYFPDDFLTIIDESHVTVPQIRGMYNGDRARKETLVDYGFRLPSAKENRPLRFDEFESSVNQVIYVSATPAAYELSKSRNVVEQIIRPTGLVDPEVIIRPVSGQVEDLLKEVKATAEKNERILVTTLTKRMAEDLTDYYARIGIKVRYMHSEIDTLERIEIVDDLRRGKFDVLVGVNLLREGLDLPEVSLVAILDADKEGFLRNETSLIQTIGRAARNVNGRVIMYADEMTDSVRNAYDITLKRRKLQMKYNEVHGITPTSTQRTLKEKLAEEDERYKIAGANIEKMPKDELRLLIKDIEKDMKDAAARLDFERAADLRNKLYALKGMDK

SEQ ID NO: 11120 - protein, 962 aa, Methanobrevibacter gottschalkii
MTEDSKKQIIIRGAREHNLQDIDVCVPRDEFIVITGLSGSGKSSLAFDTIYAEGQRRYVESLSAYARQFLGQMKKPEMESIEGLSPAISIDQKTTRENPRSTVGTITEIYDYLRLLFARVGIPHCPNCGKEISQQTLGQIGDSIIEEGEGLKIQILAPIVRDKKGQHKDVFEDLRNKGFVRVRVDGEIRELEEDIGLAKTYRHSIDVVVDRLKTRRDVDFKRRLVDSLETASEFSEGLITVLFTKDDEDYEKKYSEHFACVDCGINFEELTPRMFSFNAPQGACPECNGIGSKMEIDPDLIVPDKTLTLSEGAIAPWSKSSTKENYYYQMLEAVSEYFNFSMDIPFNELDKEYQNTILYGCNDKIPFTFKRRNKSYMVNRKFEGVIPRMERLYVETKSNYSRKYLSKFMSDRKCHVCGGKRLRPEVLAVTVGGKSIIDVCDMAIKDSYQFFQDLKLTERENFIAKEVLKEIKERLSFLVEVGLDYLSMSRSSGTLSGGEAQRIRLATQIGSGLVGVLYILDEPSIGLHQRDNIKLIDALKRLKDLGNTLVVVEHDEETILSADYVVDIGPGAGEHGGKVVAQGTPLDIMNNPDSITGQYISRVKKIEIPKQRRPGNGNFIRIVGAAQNNLKDIDVDIPLGKFTCVTGVSGSGKSSLINEILYKGVQGKLAKKFTFAGKYKEIEGLENIDKVIAIDQKPIGRTPRSNPATYTGVFTDIRELFANTPESKARGYKPGRFSFNVKGGRCEACSGDGIVQIEMHFLADVYVPCEVCGGKRYNEETLDIRYKGKNIYEVLEMTVEEALEFFENIPKITKKLQTLYDVGLGYMKIGQPATTLSGGEAQRIKLAKELSRTSTGKTLYILDEPTTGLHFADIERLLDVLARLTDAGNSVVVIEHNLDVIKTADHIIDLGPEGGDGGGQVIATGTPEDIAKAGTYTGEFLEKMLNENITPYAKELVEDIGK

SEQ ID NO: 11121 - protein, 402 aa, Methanobrevibacter gottschalkii
MVLSTGNTAWMLIATIMVLLMSVPGIAFFYGGLSKRKNVLNSMFLSLIAFAIVSILWVMYGYQFAFADLSFAGLIGIPKTLFMEGIGVGSLTGTIPTFVFAGFQLTFAGLTAAVVSGAIVGRMKTKAWVIFIILWATFVYIPICHWIWGGGWLMNIGAIDFAGGVAVEVNSGFSALALALILGKRKDTSLLPHNLGYSILGAGFLWFGWMGFNGGSALAANGLAGSAILVSNTAAAVAMIVWLLLDVLNDGKPTVLGAITGAVAGLVAVTPAAGFVSLSGGIIIGLGASLISYYAVFYIKSKFGYDDALDVFGVHGLSGVWGLIATGLFAAPSINGVAGLFYGNPEQLIIQLIAVVAAISYSFTVSYFIGKVLDILIGLRVDDKEEIMGLDSALHEESGYRI

SEQ ID NO: 11122 - protein, 112 aa, Methanobrevibacter gottschalkii
MKRIIAVIREEMFDPVKLALLAAGCEGMNVSTVKGRGRQTGIKESYRGSSYCIDLIPKTRVELIVNEEDLDRIINIILENARTGDIGDGKIFVSDVEEVIRIRTGERGSDAV

SEQ ID NO: 11123 - protein, 499 aa, Methanobrevibacter gottschalkii
MKELYEKMIDEAMAAQKADVSVVSKNRYNDFKIVDAKPYADAVSNMKALDNQAESVINLHKESVKNHYEILSSITKTLKCEDDPFIEHFQTPPVFEILCDEDGDFADSVDKFVQAIADAEALIAKESIRRYGGFYGPTCVVDFALMPGSTSNVVNQILKTVDIPVHHKQAILSAKSWGMNTSYGIGDAFAHAIEDGLTAAQATEKEIETLQMIYKTPIEGQGTLMDNANHSSFDVRDHMNKYKKAMTKSVKAAMDDGVHYGNIVTVPAYCVGDIGHHIGQSTYNMCKDDVIMAIIEATTGVIENSLRNNIDKFKTPFDVLKLSTGAPACATEFLLELDGFTAPMIVDLLNKRFHNYVQQYPTRGAAAELHNCDFMDMIYRGFNAMSNARKMRSSAGFEIIPRIKGMEIDFTPILENEVLMNPQRYTYPACAISVRFSSLMRLADYPCLLTSEPITATMMTNIIALDKKTPGSPVRGCKQCASACLADNTHEYCQWREAV

SEQ ID NO: 11124 - protein, 257 aa, Methanobrevibacter gottschalkii
MPCNIRKKFFAELLGTFFLVFFGTGSAVVTLLVSQSINPANVGIGVLGGLGDWIAIALAFGLTVMIGIYAFGRISGAHFNPAVTIGLLVTKNIPLVDSIYYIVAQLIGACLGSLALFLCLGAQAVTIGGLGATAPGLGIGYMQAMFAEFIGTFFLMMVIMGVAVDKKAEPGFAGVSIGMTVTAVIVVLGSFTGASINPARTFGPYLMDMILGGQNLWGFFPIYLVGPILGAICAAFAYAYLAKNSGVCELPQPFKDE

SEQ ID NO: 11125 - protein, 593 aa, Methanobrevibacter gottschalkii
MNKEIIAAVMASTIDMDNMSSDRLEALTKGHGMLNIAAICSANVIAEEVLRGVNLQLTDENIGELPIDDLLRKSIEAAENAGADAANAALLSATLCYFAGSNAQAGVPAGNRKLGAMARMIAGVDRCGVLAIPTPKANNRISGYAAVKAVYDEVFNNSLTPIDGSILPLGVGGGPLYGHNALGEDIGFSQLAINGAKAGTKGMLQAFANVGMPPSPIIAAILGVAAILEIVHPDSEVAEEYGEFFVANSAYVAGLGACEVAGLPEKLHIRGTGEEYDTANLVGDLGVIMKDIGGPSVVGMIAFEEMLSAFEESLDIGAGFSGGPLQPPLGHMTADAILALKVLLSTNGDIDQAAEKIKEIKTNFWLEPEIAKIATNTIARKSEQVRRGPVTRAMILATEGALTKETLRIAEFTQEKITEGMDLSDITKALDDEKLNNVCKAASSLFSGMMDKDIKIMITKYAGRSRRKENPFLDNYAGFDTNVDVEIEIEGEKIVMEKLANEIIPDAVVNKKQDVLEVLPLASVPVTELQLCGHTIVNVIVPAAVAGAMGVDESEVIAKKATKGAYITSSIPGGIERARDVAKRAANIMKDLN

SEQ ID NO: 11126 - protein, 282 aa, Methanobrevibacter gottschalkii
MFLIFVRGVLMGSADIVPGVSGGTIALITGIYGHLVEAISNIRFGFLKPLFKGDFDGFVNSILDEIDFKFLIPLILGIGVAFLTLAKVVTYCMDVYTAFTYAFFLGLIIASAVILFKKLNHINFKNILFALIGCILTFIFVSLNPIATNHSLLVLFISGMIAICAMILPGISGSFLLLLLGQYKYMLNALHNFHLSEIIVFVVGALIGILGFSKILNYLLKNHEEITMAFLIGVMIGSLRVPCVEIANSISINIASLFPCLIVAVIGFAIIIVLETRFDYID

SEQ ID NO: 11127 - protein, 858 aa, Methanobrevibacter gottschalkii
MIKKQWRLYPIGSPKGALNRKREPDFVGNIKFSRNGDVLSISRFVADYNFNDNSTLNEKLMPPGEVIKLLRSQAVFLATPDDDVEKFLRSLNIKVRKTQVCDFCAYEGDITIVNSSYSYKYHNQLICRNCAFDTIKQEIKLQGFDKKIFRNLKSTLEKTGNLEKTLSVLDPHFDPLGNTNLTLFDKTKKSKHIIPPVDMKRLKIPKNFKKVLLESGNTKLLPVQYLAIKEGLLKGEDLLVVSATGSGKTLVGELSGITKALKGKKFIFLTPLVALANQKYRDFKKKYSKLGLKVSIKVGRNRVKAKGELNLPDSDVSSSDIVVATYEGIDYLLRNGNSQALSNLGVVLIDEIHMIDDEDRGTRLNGLIKRLKNLYPKTQIIGLSATVKNPEFLASEFNMKLVQYSQRPVPLERHLVYTRNESQKRHLMRKLVQKEHNTKSKKGYSGQTIIFTNSRRKTHQIANYLNNKRVNAQAYHAGLSYYKKEIIEKDFDKGKISCVVTTAALAAGVDFPASQVIFDSLVMGNKWINPNEFSQMLGRAGRPSYHDRGVVYLMPEVGNDFAGESEEAKALDLLESNSEDVYIEYDEESSYEQILADISSNSIKSRNELNDFYENIDVPISLKTATDEMEDLGLIRYASSNKFEITKYGRATSVSFLSVDEAEFIKNTLNNKEYLNRYVAHSPMYKKKKKYDKLKVLVLAMALDLEMFENAYLSSVIHNQIANALKIKFSTRLFAESTLDIISSGEAIEKVDKKFQDALIALQSDFMQCKCQDRPFCTCMQKGISEVIIHERLKGKDPQDISNKLFRKYQIQVYPGDIFSWLDNFVKNLDAIKRIAKSFNRSNVVKKTSYLIKKIENG

SEQ ID NO: 11128 - protein, 139 aa, Methanobrevibacter gottschalkii
MKGCYCLIINVDSKKTIKIGKLGKIQFEKGYYIYVGSAMNSLMARIKRHLSDEKKLHWHIDYLLKNAEITDVIYNSSTKKVECELSEFIGSKTTGITDFGCTDCDCKSHLYYFKNRNKAIHCVLNAYDSIDIPCEFFKE

SEQ ID NO: 11129 - protein, 137 aa, Methanobrevibacter gottschalkii
MIFKLQTKGHKNVTSLHKSTFEITEDVEIGLAADCIIGTSMDKSMSDFPEEFKDKIANSNTKITVILDTENGHDEIVGFGHENLTLTHPTDMVSRTSDYTCSRTLMIKANKAARDLDDNLIEDLKNEKIMDVTIKLE

SEQ ID NO: 11130 - protein, 283 aa, Methanobrevibacter gottschalkii
MKAVIPAAGFGTRFLPATKAQPKEMLPVFDKPTIQYVIEEAVASGIDDILIVTGRNKRSIEDHFDKSFELEQTLQSAGKDDRLKQVRAITDLADICYVRQKEQKGLGDAIYCAKKHVGDEAFAVMLGDSITKGPTPCTKQLIDVYRKYGASAISLEAVPREKVERYGIIKGEEVEKGIYNISKLVEKPLAHQAPSNLAIMGRYVLTPDIFDRIDETEPGVGGEIQLTDALQKLDAIYGVIFDGKTYDIGNRLEWLKTSIEFALDDSESKDILIEYMKEMIDGV

SEQ ID NO: 11131 - protein, 421 aa, Methanobrevibacter gottschalkii
MQYRLIKKTGDEISSIGFGAMRLPLKNGKIDRTEARKLIFHAIDNGINFIDTAYLYGDSETFLGEILTEDIRSKVKICTKLPAINVKKYEDMESFLNEQLRRLNIDCIDYYLIHGVDLKNMNRLLKRDLIKFIEKAKSDGKIKYIGFSYHGPKEEFQTVVDCYDWDVVMVQYNYFDENVQASIEGIEYAASKNMGIFVMEPLKGGILAGNMPKEAEKVFRKSNPDKTNAAWALEWVLNNRNVTCVLSGMDSFEQLDENLAVANRTTPMSMTFEDLETVELVKRVMRNSLKINCSTCGYCMPCPQGVNIPECMKIYNEKYLFNHKGIANLYNDVYLFNPKGLINQSFIDYYQYVGGIMGNSGNAGKCNACGKCLRKCPQKLDIIAELEKVKKEFEFPGVKYMLLFVKHVGFPLYKFINKLLN

SEQ ID NO: 11132 - protein, 69 aa, Methanobrevibacter gottschalkii
MKLEELLAPCPKCGSKDKIAHRKMLDNHRAHAEMDTVKCEECGYIFFVNENMEEDEKKQLLNELNKIYG

SEQ ID NO: 11133 - protein, 370 aa, Methanobrevibacter gottschalkii
MIIPTLNCPSKCKYCWGSENKKEMMDIGIIDQIITWLSDFRDDKVHFTFHGGEPLLAGYDFYKTALEKLSLLPNLDGFSLQSNIWLLTDELIDLFVEYNVVVSTSIDGPKEINDYQRGEGYFDKTMARYEAAKNKGLLINFVLTVTDYSKDFSDELYDFFKNEKMNLKIHAALPSLRGDNADSWALEQEEHGKLLVEWLDKYLYDLDKFSIMDLDHISKSSLRRRGTLCTFADCIGTTFAVGFDGSIYPCYRFVGMPDYILGNVGDNPSFDDLKTSDAWVKLQEFRDYVDENCKKCKHVKYCEGGCPYNAIVAYQTPKAVDPQCRAYKMIFDEVSKRMNKEFARSAFGLGGSEPKGEGEAFSIMDLAMKH

SEQ ID NO: 11134 - protein, 682 aa, Methanobrevibacter gottschalkii
MIDEITDFLFGLKMTIVSGIFLLIAVIFMIFGVNTPIYLNPAWGTVIISGIPMLTLAMSRLIREKWISSALLIAIAMVASLLIGEVFAAGEVAWIMALGAILEDWTVERAKKGLKNLINLTPRTGRRIINGNEEMIFVNEIKIGDILRILPGESVPVDGEIVRGTSSLDQSIMTGESLPIDKEVGDEVFCGTMNMYGAIDIKATSLDENSSLQKLIDLVKAADEKQAPTQRIADKWATWLVPVALIIAVVSWIVTGNIERGVTVLVVFCPCALILATPTAIMAAIGQATKYGVLIKSGEALETLGGLNTLVFDKTGTLTYGNLEVSDVISLNEHLTDEDLLKITASCEKLSEHPLAKAIVNNANEVKIQIEEPEEFKMYPGKGVTCINSYGRVYVGNSKFLSENNIHINIDSQLDKLKHEGKASIIIALNGEVIGLIGLSDVVREDSKSMIDKLHDLGNETILLTGDNTETANYFAAKVGISRVYGNLLPHEKLDRIEKLKNDGKNVCMIGDGVNDAPALKTSDVGVAMGSVGSDVAIEAADIALLGDDIGKIPYLKKLSNSTLFTIKANIAISMTINAVAIVCSVLGLLNPVTGAIVHNAGSCLVVLNAALLYDRHFDDSVKIMDTESVEHSHYHFHNDGEHTHSHDHVHIINEIRTDNGIKHIHAHKHAFRRQICKTYHS

SEQ ID NO: 11135 - protein, 300 aa, Methanobrevibacter gottschalkii
MLTSVQKEILQTLINLYQSSNGKSIKGEDIAEVMGRNPGTIRNQMQSLRSLGLVKGVPGPRGGYKPTIEAYHSLNITVSDKDSKVPIFKNGNRVEDISVAKIEFTSVPQPSECEAAIKVLGSIKDLTLGDTISIGPTPVNNLGILGTIVGRDDMDNILLLDTKTIRSIPKQSVGEIASRDVISFKMNCTIKDAAKRLAENEIDGAPVMKDGKVVGVFTVSDLVHAIAEDKDNCTVGELMSTNLIIVNEDLKIANAIEVMLKKSISRLIVADNNQDLLGIVTRTDLINIIANLDQFPIITN

SEQ ID NO: 11136 - protein, 307 aa, Methanobrevibacter gottschalkii
MKVNQINVESNMNVSDLIDNFDASGVLGAGRVARARNILVDMIQDKDMNVFMSLGGPLIPGGMRNVVSKMIKEGHVNLIVSSGANLTHDLVEAFGGAHYRHEGKDDEELNEEGIGRIADINVGSDDFTIFETEITKIFEKIASKRKVISIQELLYEIGLLVEDENSFIANAAKNNVPIFAPGIIDSMIGLQLWIFSQDHDFTISAAGDMPYLSDIVFGSEKVGAILLGGGLTKHYTLASNVITGGLDSAIQITMDRPEAGSLGGAPLEEAKSWAKAKCGSNLASVVGDVTVIFPLIYASALDKINSD

SEQ ID NO: 11137 - protein, 159 aa, Methanobrevibacter gottschalkii
MKYSDDLFDDKKDLKFASVFGVLCAIASAGATIYSTEAAYIFIAILLGNLIALKVDGIHHIITLLLFVLLCLVFGIPELSYVILLICILAALGDEVGHELISKVTDNKFLNLFFEYRFVMKVVILLLAIGGVFSIWIFLCFLSFEIAYEFAGIIFERFN

SEQ ID NO: 11138 - protein, 81 aa, Methanobrevibacter gottschalkii
MANEVTKLVMETILGLITTAFAFVAGLAWNDAIQKLIATIIGTGDALPSLFIYAIIVTIVAVVVTVLLARVAGKMGIELGE

SEQ ID NO: 11139 - protein, 215 aa, Methanobrevibacter gottschalkii
MNIKNNLILALDVMNESDAIEICDSIKEYIDTIKIGYPLALAEGLEIINKLKNKFGFKVICDFKVADIDATNSKICDETFKAGADAIICHGFVGEDSVQACLNMANKHGKELFLLTEMSHPGAKMFLQKNADAIAQMGVDMGITNYVAPATRLDRLSEIRNIVGNESYIISPGVGKQGGDGKKTLEYSNAIIVGRSIYESEKPKTACKNLIESLK

SEQ ID NO: 11140 - protein, 221 aa, Methanobrevibacter gottschalkii
MHIMEGYLPLTWCIVWFVISFIIVAFGIYQIKKIVDETPESKALLAVSGAFMFILSSLKLPSVTGSCSHPCGNGLGAALFGPAVTAVLATIVLLFQAILLAHGGLTTLGANIFSMGIVGPFVAWIAYKGLTKANISSTIAIFFAAFLGDLLTYVATSFQLAFAFPAPTFSAALGKFLVIFAVTQVPLAIGEAILTVIIWDRLKAYKPKLLNKLGALAPNEA

SEQ ID NO: 11141 - protein, 95 aa, Methanobrevibacter gottschalkii
MKTSTLIILAVVCIILFVAPLAMYNGHGEDDGYFGGADDAAGEAIEESGFEPWFSSIWEPPSGEIESLLFALQAAIGAIIIGYAFGYWRGKGKEE

SEQ ID NO: 11142 - protein, 229 aa, Methanobrevibacter gottschalkii
MKFDMDYIAHNNALTETNPYFKLFLTIILLIVTLAFDNLYFDVTVFVIMSIVILTIAKINYKSYLKFLSIPMAFLVITCIFLIFFFGKGDVIYETGILGIVVTTDSWHYGVYTFMRVLGCLPCLGFLALTTPIAKILNCLRTLKVPKILIEIALLMYNSIFIFLNEIDTMQKAQETRLGYHSYWSSFSSLGALVSIIFLRSLDKSETLQYSLDSRGYSGELPVYEPKKR

SEQ ID NO: 11143 - protein, 280 aa, Methanobrevibacter gottschalkii
MINMLEVKNIKYSYNSNYQALKGVSLKVDKGEMVALLGKNGAGKSTLFLHLNGIYRPDEGKVFIDGEELKYDKKSLLKFRQKVGIVFQNPDDQIFAPTVEEDVAFGPLNLGLPMEEVQDRVEEALVRVGMSGYEKTAPHHLSGGQKKRVAIAGILAMKPEIMVLDEPTAGLDPQGVVDLSKLLRELNDEGITIIISTHDVELVPNYAQRVFVLVDGLLIAEGTPKEIFAKPEILEKANLKVPIVTELFQKLEDEGFDMEGNYPLTIDEAKDKFLKLLHEN

SEQ ID NO: 11144 - protein, 152 aa, Methanobrevibacter gottschalkii
MRIGICDTTFARFDMAGAAIDELKKNAYDLKIIRQTVPGVKDLPVTAKILIEEENCDIVMALGMPGPMKKDKMCAHEASTGLINAQLMTNKHILEVFVHEDEEDNPVELAKLAENRAREHAQNLIKMMYHRKAMRKEAGMGMREGKENAGPL

SEQ ID NO: 11145 - protein, 235 aa, Methanobrevibacter gottschalkii
MGFEVTEEDKKATYVILPAYNEATRIQPVIEEIAEKGYNMIIVNDGSSDNTLDVIKESQNKYPDKIFIYSHMINRGVGVAMQTGFDAVLRYNPRYIVNMDSDGQHDADDLENVLEPLIMGRAQAVIGVRPLKDMPLTRNIANAIMNLLTKVFYKVDVSDSQTGFRAITIDALRKININARGYLISSEFIREVNDNKIPFEEVEIRTIYTPETRAKGTNVAVAFKILIQMIKHRLR

SEQ ID NO: 11146 - protein, 115 aa, Methanobrevibacter gottschalkii
MLFYSILFPIISLIAIIWLLWRYLNEKDSLITVILWAVFLIIVSVFAIFPHASTTFAKLFGITRGLDFIIIIVFAVLVYTIFKLYYKIDKLEDNINKIVKEVALSNEISLKDKED

SEQ ID NO: 11147 - protein, 223 aa, Methanobrevibacter gottschalkii
MLYFRGCTAREKLNNIQSATEKLLKLADVDYHILDDEKCCGSVLLRTGFLKEAEDQIKKNTEILKGETIITSCAGCYKTLTEDYDGLDVIHISQLLDELIKEGKLKLSKMDLDVTFHDSCHLGRHCAVFEEPRDVITSVADIVEMKNIRENSLCCGAGGGVKSAYPEIADQMAKSRIEQAKETGCKTLVTSCPFCKLNLENGDLEVLDLTEFLVKYGGLNERQ

SEQ ID NO: 11148 - protein, 400 aa, Methanobrevibacter gottschalkii
MKDSELETMRNSFNTVKNRSNSLIESPSAKRLISRGREIKKYSIENNDELLNQVCESFKRNDVDFKIAETAEDALSIIDDLLCEYDCNTIAKAKSNTLGEINLKRHLANENIDVVETDLGDRILQLKKIDNKPVHPTGPASHLNVDNITDIVNESLDVNVNPVPREIMEAVRYDVLKRLENANVGISGANAIASEEGSIVMVHNEGNISLVSLKDLHIIVAGIDKIVPTLEDAISIVKLETIFATGNYVTSYMNVISGPSKTADIEKKLLKNMYGAERVVVILLDNGRSDATQECLYCIGCGNCVVHCPVYNAVGNEFGFNNYLGGRGVAMSKFIEDDETCYNSGLYMCTLCGLCTLNCPVDIPTNEIIENMRKLSADAGFYPKAHGIIKDNVSSKDSPY

SEQ ID NO: 11149 - protein, 237 aa, Methanobrevibacter gottschalkii
MLLLISPINREEALESIEGGADIVDVKNPKEGSLGANFPWVIKEIRELTPEDKLVSATLGDVPYKPGTVSLAAMGAHVSGADYIKVGLYGTKNHDEAVEVMENVVKTVKEISEETIIVAAGYADAHRVGAVEPMEIPKIAKDAGCDLAMLDTAVKDGHTLFDYLDLNQLKEFVDEAHGYGLLTALAGSVKKDQLKPLHDIGCDVVGIRGAACVGGDRNTGKIHHTAVAELKELCDSF

SEQ ID NO: 11150 - protein, 494 aa, Methanobrevibacter gottschalkii
MSFSKKVQEARMSYTFDDFLLTPNASYVEPKDIDTRIELGKGIRLNIPVLSAAMDTVTEADLAIAMAQEGGVGVIHRNITQERQVEEVKKVKNAEDLTIRDVITITPDSTIADVQTKMQDELISGLPVVEGDKIIGIISKRDIRPVLKSEPDKTVKDIMTSDVVTVEEGVSAEEALNIAYENKVERLPVVRDGKLVGILTIKDILNQAQYPNAARDKNGNYLVAAACGPFDLDRAMALDQAGADIISIDCAHAHNMNVVKFTETIKDNIDAELCVGNIATAEAAEDLISMGVDALKVGIGPGSMCTTRIVAGVGVPQLTAISDVADAVEDTGVPVIADGGIRYSGDVAKAIGAGADAVMLGNLLAASLEAPGDIVVMNGKQYKKYRGMGSMGAMTSEYDGGADRYFQGQKSKMNHTKYVPEGIEGAVPYKGTVAEILFQLVGGLKSSMGYCGAKDIAAMQEKANFVRITSSGIKESHPHDLLITNESPNYPTLD

SEQ ID NO: 11151 - protein, 89 aa, Methanobrevibacter gottschalkii
MARTKKVGITGRFGARYGRKAKRSVKIIEENMKKNHVCPKCARPYVKRQAAGIWKCRKCGAVFTGGAYIPQTPMAKSATRNIRDIKVEE

SEQ ID NO: 11152 - protein, 43 aa, Methanobrevibacter gottschalkii
MYRCPSCGAEVDHKSYMENKCPKCRYRILFKNVPETTRIIKAR

SEQ ID NO: 11153 - protein, 161 aa, Methanobrevibacter gottschalkii
MLISTSRKPSQKTRKFCKNLAHATGSISVNRGKMNMRELLIKALEVEEYNLAIVNEIKGNPSRISFYSNKGKLLLTLIIGASEEKEKMNIAPSQLKIVSEVKELNILSEILDMDLVDNAESNYILISEDEDSLANINFINKFGDMNNFKINVKKILEVSND

SEQ ID NO: 11154 - protein, 88 aa, Methanobrevibacter gottschalkii
MIDESPLERVRSNIVIEFEDNAQAKIIYDSIILEFSTAPDFRSSMTIDLDESNIIINIDAEDSTSFRASVNSAIKWIKLALEINDLTN

SEQ ID NO: 11155 - protein, 115 aa, Methanobrevibacter gottschalkii
MEIPENIQQQLNQFQQLQQQAQAISMQVQNVEIQIQETEKALEELKKTDESTEVFKQAGTLLIKVEYADALSDMEDKLETLGLRKQTMSRQEERVMKKLEEMQASIQSVMQGMGQ

SEQ ID NO: 11156 - protein, 94 aa, Methanobrevibacter gottschalkii
MSKLKTLSQDDLSSISDKFGEILEKEISKSISMKELEDLDLDIILNYENEQLDVDVNVGVLFDELSEITQDQVMQSIDEAYLKFDSYIDDNFRM

SEQ ID NO: 11157 - protein, 229 aa, Methanobrevibacter gottschalkii
MIKKIPVIDLKQHQAVSGKSGMRDKYQPLKTVFAKSANPVEIAQGLKLNGATEMYIADLDLIESVGHNINDIKMVNTILPVIFDGGVKNCEGFEFFLNYAYKIIIPTETLESIDEMRKIFEKYPKERIVISVDVKNGELLAKHLNLNLSEFKEILKELDPNDIIILDISSVGTERGYNKKLLEEFGDLKEKLIIGGGLNKDSLVELESLGIKKVLIGTSLHSGEVKLLD

SEQ ID NO: 11158 - protein, 59 aa, Methanobrevibacter gottschalkii
MAIVGTTIFSHILPVICGFFGIVMIISGSLEKSNSKLGLGIVLFIIACIFPYLILSVLV

SEQ ID NO: 11159 - protein, 282 aa, Methanobrevibacter gottschalkii
MRIDTHHHHKKAGENLAFVFFMNLTFNIIVIAGGLATNSMAILADCIHDMSDTISIAFAWFLEHVAQKDSTDKYSYGYQRFSILGAVIISIFVIIMALLILQEAIPRLFAPESVDANGMLLMAIVGLVFKSISVYRLHGGETFNEKAILLHQLGDVLEWITILILSLVLMFWDGAPYLDPFVSIGIALWLIFNLGMNLYKSVEVLLQKTPNHFDVKEFKVNVLNIEGIKSFDDFHVWSLDGIDSVLTLKVSIDDWNNQEKIKNDIYNIASKYHIVDITIEFD

SEQ ID NO: 11160 - protein, 294 aa, Methanobrevibacter gottschalkii
MVEKGTDVLKEGFAKMTKGGVIMDVVNAEQASIAEDAGAVAVMALEKVPADIRAAGGVARMADPTIVEEVVDAVSIPVMAKARIGHIAEAQILETLGVDMIDESEVLTPADEEYHINKKEFTIPFVCGARNLGEALRRIDEGAAMIRTKGEPGTGNIVEAVRHMRMVMGEIRTVQGMEEEEIWKYARKIEAPIDLVKKTAELGKLPVVNFAAGGIATPADASLMMQLGSDGIFVGSGIFKSNNPEAFAKAIVEATANYDKPEVLAEVSKGLGQAMKGIEMSTLTEADRMQDRGI

SEQ ID NO: 11161 - protein, 270 aa, Methanobrevibacter gottschalkii
MTLVIIGPVTQDLVVIGEKSTHKIGGATYFQSFVFEKFYNDYLAIVNCSDEKIANEFPSKDKVKVILKEFTHFFINNYPDVNNKDYREQLSNFVQIPIFKSDLEKILPKKIDGFVINPLNRHDFPIETIDYLKSFNVPIFISIQGFLRIPDVEVNGKYAIKLGTFDKLSDILEGVSSIFLDEGEANITGIDFDVDEVVITDGSNGSRIISDNHETKINAVKCENIADATGCGDTYMAAYISKRLNDYSIRSSGEFASDISSKKLTKFGHY

SEQ ID NO: 11162 - protein, 194 aa, Methanobrevibacter gottschalkii
MVKIGILNLQGAVSEHYNITRKAVKNMGVDVEVESVRYAEDVETCDGLIISGGESTVIGKLIKQRGIDKVIKENNIAVFGTCAGMVLLSKKTDFNQPLIGLMDIAVKRNTYGRQKDSFECPIDIFGKKYLGVFIRAPALDSYNHSKEDIKVLSVLDDEIIAIQQGPHIAISFHPELTEDTLIHEHFIDGVINRS

SEQ ID NO: 11163 - protein, 2391 aa, Methanobrevibacter gottschalkii
MLNKSSNIIEKEFKNLRKELLDLTLRNQLLNFKSRAKTITIVNQTPVNLFQTLVLQDNKMYFVANKKDKKEDKSSVWDHIPFDFSKFSEGDKKLATELTPKELQKRLYYINNQAKTMLQEQGYNILYLAIGFLEWTDKSKPKQRNNAPLVLIPVAMERKKVGESFNLEWTGEDIQTNISLKAKLLEAGIDFPDFEFKRYGEVIDHYIASVRRSVSKMDGWTVNNNVALGFFSFTKFVMYNDLNPEAWEDNVDLTKNELIQAIFNPAKNDHESFREEDIDSRLEYQNMYQVLDADSSQIAAIQDVKAGRNLVVEGPPGTGKSQTIVNLIAELLAEGKSVLFVSEKMAALDVVKDRLTGVGLGKFVLELHSHKTRRKKFLKELQKATNVQSQEPLNIDQTIRKLETLRRQLDDYSQIIHKPVFAVNLSAFQLYGMKESADDHFATKNALMPLVRFDNPESITLKDLDDMKIALENLAELYQTISKENPWSKCSPKSLLPADLREIEMLIGDSLYALDNFLVERGRVYDIYGIKKPDTLNEFQNSLSAFEIIKSQNAELIDGNILKSGAWNNNNDDAFKLIQELQRYQKYAETLTKFNQSIFQADIDGLVYELRNISNKKFRFFNNKQHIELVERYYSIPVSGSVDDIIRELQEAKTIINIRKSLEANNALGQKYFGGYWHLNANIDDLNAIAKWMHEFTALVHEGTFSENTIELMSKDLFDIKPERDLSDYIDAGEEFVHVLSRLKDKLNPRSKLIFKRETGDVPFESWKEQLYNWRGQLSSLHLWSQYLNTKNSLKSSNAKMFVDSIEKRNIKKEDIEALVDGNFADSLLNILFVENQELATFVGELHENRIREFKDLDKQILVLNRKRIYQKLNSNIPKIFGGTENPQAKILAGEFTRKSGHMPVRKLLEKTGGMIKQIKPCFMMSPLSIAQYLDPTNEELQFDVVIFDEASQVKPEDALGAFMRGKTAVVMGDTQQLPPTSFFDQMSDAESDEEEATSLDMESILHLCKLSFPVKMLKWHYRSRHESLITVSNREFYDNDLLVYPSPSHNDPELGLKFHYNPNTAYHRGSSSANPLEAQDVVEEIFNHFEKYGDTKSLGVGTFSVAQKNAILEALEVKRKERPEFEPLFSDNKDERFFVKNLETIQGDERDVILISVGYGYDQDRKMSLNFGPLNQNGGERRLNVLITRAREKCVVFSNFKAYDMKLTANPPYGVKSLKEFLEYAENLTLGTDNQDSYTREPFEDAIASFLEENGYTVDRQIGCAGFRVDLAIVDDENPGKYILGITTDGKMYSSSKVARDRDRLREQVLSGLGWKLYHLWSTDWYRNRDLGRKKLLDFVQKSIRQTREEEKRKSEEEKKLAEKRRLEAEKKAEELRIAREKEEAERKAKEEQETNNEINIGDIGPADFVEVEKVDDGDFLEKPIDVSSINPSEFFEEEPSRNSINEDKTTKETPSEFVSIEHPDKDVDFKNNSSEVANQYSSDDESFEVRNNDFKDIESEHPKSDEDDDEVKIESLDDLNADEYNEENESYEEIHKENTSKVMENDEDYSDESDSISKKLSDKFKSILKSDGQEQEENTHSFFSSSKFAKDLGKNSDLNDEKSFEVNDEFDSKINEYTDNEILEENPVDLDSKEDTSVNEEDTSDFKTPKFSNKIDLESDDFIVVDHEDNEVSKSSSENIENDDFIVVDHDNDEVSKSSSENIENDDFIVVDYEDNEIDENQKYSSVGSDLDDEVIMDYNEVPKNKSYSDKTEDISNETTDDKVDLDPEEDYIYVDHSHDDERVLDEDDVEKFSFKSDEISEEPEFEVDKKPQGQKQYHRKGSTFVKSIISDVVMGESHLEQEEVETVKGEIIEEDEDYDYKDAPSDDSVVEAEIVYDDEELNILNDNLPDDALEKPTPKHVYDDEELNIFNDNLPDDTLEKPAPKRNHDIENDDLDKPTPKMDYTEGDELNIFTDDLPDLNKEEINRNATDIVTKAMEEFLEDVFENDDDIEKIELENEIKEDIPQDNEMVIEDKGITEHNIEETSNDIGDGVTYYQGSNDVRSKLRKNNFYYEEEKPKSVRESIKGIKKDMEYINKSLKEIENPTKIDYVSVVDRTEEYDPMDYLNIPSDDDSDKIIEKEEELTFAEKEELRIEKEMMMDDLKKEIKEEKDVIVPVHEQDRREELKDQALENIILSANEDYKEIERERRRKDNQFKSFDDNKLPGKRKMEDEIVDYVHIEDIGLHSSDELYRQSIDKIAKSINDIVDIEGPIHVSEVTKRVKESCNIKRAGANLKKRVNEGISEAEKLGYIIRIGNFLYDSSNNNIVIRKRNKPNIELISDEEIAKSIETVLLHKQNVTTKQIAKEASRNFGFKSTSKKTATRINSILDLMIANNKVKLDKDIVELK

SEQ ID NO: 11164 - protein, 583 aa, Methanobrevibacter gottschalkii
MSTKVKSPDNLPNKPGVYIMRDNTDTIIYIGKAKNLIKRVKSYFREKLDRPKTQVLMSHFDSLEYIVTNSEKEALILEANLIKKHRPRYNVQLKDDKRYPYVKITDEEFPRLVITRNVTKNGVYFGPFTDVGSVKQTVKFLKSLFKIRTCRNMNGPCLNSQIDLCYAPCDGRISKKEYSEIINKIDLFFQGKYSTIVKNLKKEMADAAGKEEFEKAAVIRDQISSIEEIMEKQFVDLVDDDLDQDVIAMAMGKNEVVVIIMPIRNGKIVGRDDFLMSGSKYDSPSEVMFSFIQQYYGYNRHIPKQILLDEDINDKKLLEDWLSDLRGNKVRIKIPQKGVKLRLVKMAKKNAEIIKHQKKKMENSLIELKKYLKLERIPHVIEGYDISNISGKFAVGSKVSFKDAKPNKKMYKHFKMETPGPNDFAMMEELLTRRLKLIDSDPEPDLIVIDGGKGQLGMACGVLEKLNLTHIPIIGLAKEFEEIYIPNSKRPIIIPKNNRALHLLQQVRDESHRFAITYHRKLRSNDIQASSLDDIVGIGKKRKINLLREFGSVDNIKEASIEELAKIDGMNLKTAKNVYNYYH

SEQ ID NO: 11165 - protein, 179 aa, Methanobrevibacter gottschalkii
MVKCPRCGYENSSTAVYCDNCAYLLTDSEGNRIDNSPRVSSWNISFAKKIVIVLGIIVIAMLLFSFIYNNTQPSHEDSLNLITDNGTVHKTASYPYKAVIEYEGSWGAKMGDPNYLVSEDGYGTKSFVLDCAAWDRVSISAQKYDYGEGELHVKLLRNGEVVAENSTTNVTGAVVVNYN

SEQ ID NO: 11166 - protein, 101 aa, Methanobrevibacter gottschalkii
MIKVASEDKIQEYQNILEEEKLMIETHFVNIERILKEPEKIEKDKIFALMNSYNTLNIQYEQLCSDLIEFIKIFKGSDQEIRLYKTDELINLLESKINQMD

SEQ ID NO: 11167 - protein, 567 aa, Methanobrevibacter gottschalkii
MIKVENVSKDYELADGTKITALKNVSFEVKEGEILGIMGKSGSGKTTLLRALRGVEHIDNGIIEVGKAKVTSESSQFYYNNLKKETAIHLQRSFGIWPDTVRENVLRKLYARRYFDEGDTNFEIAESEFGKEADELLELVSLTDKQDHYASVLSGGEKQRLIMARQLAKQPKALLLDEPATMACPKTKQEILDAVKKINKELNITVVVVSHLPDVQKYLADRVILLENGEIAEEGSANEICDKFMDEMDDIVDIDNIATDEDVIQVNDIYKRFFLLTGGEVLQIEDVNFTVQKENILSIIGPSGAGKTVLLRMLGGLEDPDEGEVLYNVDDEWSDIDIPGMGRMKIRSKLGFMHQEFALNHYSTVLNQLATRLGYKNQNIVKEAQQRARKIGLSEELLDSFYLLTDLPEIEARDRLKKVGLDSDILDDLFPRFPETATKEAVADIFESLDLDMSILHRKSYELSGGQKVRVMLALILVSRPKFLLLDEPFGDLDPVTLRDVTNALKKISKDYGITIVMISHNTDFIKELSNRAVFMDDGKIIDDSEDIDKIVDNFIDFCHADYLKGE

SEQ ID NO: 11168 - protein, 141 aa, Methanobrevibacter gottschalkii
MFDIIAVPVDGSDYGYKAADVAIEIAQKFNSKIAAVHVLEEFSFSSYDSEEDEGNSILSKITKKANDVGVEVTEHLLTADPLRDMKFIVDQTRADLVVIHAHGSNNNRFVSFEENNVSDTQIGSVSERLLRTSEVPVLLIR

SEQ ID NO: 11169 - protein, 55 aa, Methanobrevibacter gottschalkii
MIVKDWCSFCGECAGVCPRNLIQVREYSLVFNDDDCKDCNTCIKACPIDALEKED

SEQ ID NO: 11170 - protein, 392 aa, Methanobrevibacter gottschalkii
MIETDVIVVGSGPAGSSAAKHAALGGAKVILMDKKSEIGSPKRCAEGVSIQGLEKLGIEPSPRWVTQEIQGVRIQTPDGTDTWLTKDEVKLPEAGYILERKVFDKHMAMDAARAGAEIRIKTLVTGIEKIENGYLVFTESMGKEEVFKCKVLIAADGPEGHIARWAGLRPAAKAKEMESGVQYEMCNVEFEKPGVIEFYLGSCAPGGYVWIFPKGDDIANVGLAILPHKAEKTAIEYLDDFVAKSPYLKNAQAVEINVGGDPVGGMTKKLYDDNILVCGDAAGQVNPLTGGGIISGMTGGMCAGQVAAQAIKEDCSKKFLKQYDEMAHAELDHEIKRYKKVQEYLLTLSDEELNEIAHAFEGETFEKISTTEIVKKLIKLSPKALLKLGKFI

SEQ ID NO: 11171 - protein, 322 aa, Methanobrevibacter gottschalkii
MILITGGAGYIGSHTNKALHNAGYDTVVVDNLCKGYENFVKWGNFENYDFGSKTLREVFEKYDIDGVIHFAAFSSVAESVEMPQKYFKNNYKNTLNLLQIMREFGVNKFILSSTAAVYGNPDKVPITEDQDLKPINPYGHSKFITEKALEREAEKNDFNFVSLRYFNAAGADFDCEVGEFHDPETHLIPLVLDAAIGKRESISIFGDDYNTADGTCVRDYIHVNDLADAHIRAYEYLCDKNESNIFNLGNGQGYSVREVIDMCKKVTGRDFEVKIDERREGDPDILIADSAKIKEKLGWTPKYNLEQIVESAWKWHKKINVI

SEQ ID NO: 11172 - protein, 297 aa, Methanobrevibacter gottschalkii
MENESHESKIDVRIIVSGLDIAQLVSKAVNNIHLENDYNIVVSSIIPTVELSIVKKVASGADILLIGGYGSDETYNILFNELKTDFNHIGLFDYNNIIVEDESIDFKLAEKEILNSIIKSTLSYSLNLINVHTLENKLMKVTHNYNNLLDDYNQVLKENEVLSQENNELMEDIKELKSDFNAFKLRYEDIYSKEILEIFSLDDLWQETFRQDLLDGDRIVIATDKFKPDDILVGQGFIASQSKEKAIEWLKIIRTALIFVDDNAGDLKKESGIGEEENIPEDKDDYDMSNTFENFWD

SEQ ID NO: 11173 - protein, 473 aa, Methanobrevibacter gottschalkii
MQGEIEDKCGIVGIHCPDESKNVASFVYYCLYALQHRGQESAGIATFNPEKGLNYYCGMGLITDVFKDYEIQNLKGNMAIGHVRYSTTGQSRLENSQPFVTDFDDGFIAMAHNGDIVNSAELRNELVKEGYEFKSDTDSEVICYMLKREHYDNNKNIIDSIESVSKKLVGSYALTILVNGDLYGVRDPMGIKPLAVAKRGDEFILASETVAFDVINAEYIRDIEPGEVVFFENDEINSHMLEIAGDCKISHCMFEYVYFARPDSTIDGINVYETRMNIGRQLHELYPIDADVVIPVPDSSIPAAIGYSRASGIPYGEGLIKNRYVGRTFIMPTQEERELAVRLKLNPIKDAIKGKRIILIDDSIVRGTTSKKLLDLVKEAEPAEIHFLVGCPPVISPCFYGVAMATKKELIAANYSIEEIQDQLEIDTLGYITIESLIEAIGMSKDDLCLGCINEEYPTEIPEGLEAETYYKP

SEQ ID NO: 11174 - protein, 415 aa, Methanobrevibacter gottschalkii
MVELLAPAGNFISLRAVLENGADAVYFGLDDYNMRANAKNFSLNDLKEVSKIANEYGAKTYLCTNTILNERLACSLDNKLGDIASSEIDGLILSDIGLIENTVSNGLEAHISVQQNVTNSYMLKTLKKLGAKRAILSRELSLREIMDLAKKSPIETEIFVHGAICMAISGRCFLSYGLYGRSANCGDCLQPCRKNWTLTYEEGDDNVINFSDAEEESFIITSSDDGSYRTNFFSPKDLCMIEYIPELMKSGVASFKLEGRARSPDYGAMVTGVYRQAIDSYIADPLNYKVKEEWMEELENVFNRGFDTNFYFNTPFEISEDNQSKYIKKDIGQVVNYYNKVKAAELRIWDDLKTGDKIIIQGKTTGSITHTIDSMQIDGKSVSSVKKGSNVAIAIPTKVRENDFVYKLVERNVDD

SEQ ID NO: 11175 - protein, 264 aa, Methanobrevibacter gottschalkii
MIKKIAIYGKGGIGKSTTVANLSAVWGSDNLKCIVIGCDPKADTTRTLHGSRIPTVVQTLKDNRKPEREDLVFRGFKDILCVESGGPEPGVGCAGRGVIVAMKRLENLGVFDEELDVVVYDVLGDVVCGGFSVPLREKYADEVLIVTSGEYMALYAANNIVKGVKKLKGNLSGIVCNCRNVENEEQIVNDFAQRIGTHVIGTIHRSNLIQDAELDAKTVVEKYPESSEAQEYRDLASSIMSNEKISTPEPMDDEEFESFFKSYL

SEQ ID NO: 11176 - protein, 159 aa, Methanobrevibacter gottschalkii
MYYSTNYNSPIGEMLFVSDGEAVCGIWFCNQKYFKNNIDKTVRKDDLVIFIKLKKWFDDYFNGLNPKIDFKLKPQGSEFRQKVWKILCEIPYGETLTYGDIASMISPNMSAQAVGGAVGHNPITILIPCHRVLGANGKLTGYAGGLDRKIKLLKLEKIL

SEQ ID NO: 11177 - protein, 179 aa, Methanobrevibacter gottschalkii
MNLPLNIVIGNAISLIAGIFILFSMWVNDEKEVYKHQFSNAFILTISSAFFFSWTGVVTMAIAASRNAMVYKDRLTFNWTIFFIIVSLTVGCLVNTMGIVGLLPIIALVQITLSNYYLKSIKAIKISFIVNSIIYIIYFFAIWDFSSVAIESVTVAVGMISLLRLINLNKPIFCNNEVS

SEQ ID NO: 11178 - protein, 267 aa, Methanobrevibacter gottschalkii
MQSNISEELEMKFPPIVLIKSNTKPKDVKEPKPGKGGCVMSFVAQTIAKRITTCFGREHISCGGISVGFGWGDGFRDENAMDFQASFLSCGVDSAPNKEKYLEKLSHMSKPTREMFEHGERIYSDFKTAKENIKSRPVYDSEDYVIFKGLENLNYGEIPDSVIFTVNPIELTALIQINTSFRLKDTYILTPQASGCQAIGCFTFREDESDDPKPVLSPIDFAGRSKMKHFIPNNYLIVSMPWKLFLKLEEVSEKSVLQTGMWKKFID

SEQ ID NO: 11179 - protein, 141 aa, Methanobrevibacter gottschalkii
MFNSDENNTIKVVVDYVKECSEYDLSEELYNKIELMPKIEEKIGITYEALSIRVLYLEFLKNYSIYVYGDIVENNKETLNKLGPYRKIETNVNLYDENGRIIETAQHEFAVKDFLGMHTFKVSFNNIKSIDKIDKIRIFPT

SEQ ID NO: 11180 - protein, 180 aa, Methanobrevibacter gottschalkii
MGDIMITFEVDSQLNENCGIVLRNLSFNSEISNSEEYKCNVYGEFSLKNHEDYDNLELKSIFYDDESNIINIERDYINLDGFLGSGTFDFWVYLNKDKLIKTHKIKIIPSKLRRKILKRSVCNNKISIESENLSININLKKDYSEVEKRDRKKELIKDIDETIDALSKSDEIINLINYYD

SEQ ID NO: 11181 - protein, 60 aa, Methanobrevibacter gottschalkii
MEKYYESIMKNLEIYRNIANFVSNFNIYGTSEGKYLIILWQKTVGLKTEKSHNKLAVPKL

SEQ ID NO: 11182 - protein, 285 aa, Methanobrevibacter gottschalkii
MRKISILVLLLILVGMLIPTGFATDSNVVITYGETTYSNSNYKSFVDNFFVNQANVDINNVGVKTITADQVNQVSSGITGKSYNSNQILSSALVDLNDNGNLKVSVDKSKITTITGDMYISALKSAGITSGHVYVTSPVQATGESALAGIMNSYEEVTDVQIPDSVKEAANDEIYTQAEIVNNSGVNADDLSNLVNQVKDEVSGGNVTNHDEIVNIINSHVENNNINITNNDIENLADSIEQVQNVQGDVNYYKTQVNEFLDDNSTGGFSLDGLFDWIKSFTDGI

SEQ ID NO: 11183 - protein, 202 aa, Methanobrevibacter gottschalkii
MVVKHCPKCGNDIDDEDIEFCTECGHKLSNKIIKNSSKGFFDNLNEKTSFSVIIFSFIIFGVFLFIGSVVWSSFMANGSIDLVTYLLLVIVFSVFFGGIFVGYFGCMDESYIIPNFSIYLGSIFSVVLCGIGLIFTFLMGVISILSSIAPFGSSNSISQTSTSSYAQSVDLSFIFKLVLFILLIPVASYIGVYLGYFLKKNI

SEQ ID NO: 11184 - protein, 151 aa, Methanobrevibacter gottschalkii
MKVRKILVMLLILVTLGFTLNAVVASSPDPIKLGDIKNDDLVITEVGQNKLNFEYSVEVDISDLSSEDKKLFEKALNNNNTSFILNLTSSTPTKIAITMHSLPKKAEIIGNTLYIKNNNMFRLINGIQLDNLKISAVSFNTTSGQLFIARK

SEQ ID NO: 11185 - protein, 318 aa, Methanobrevibacter gottschalkii
MNLGKLVGNTPMIKINYEYGGKSGSIYSKLEFYNYSGSIKDRIALYIIETERKNGNLKEGQAVVEVTSGNTGIAFSAIGALFGHEVHIFMPDWVSLERRKLIRMYGAHVHLVSKEEGGFKRALELAEEFAIKHDAYMPLQFDNKLNIEAQYITGQEIIDEIPDIDAFVSGIGTGGTLMGIGKKLKENNPDFKLYALEPSTLSILKMGMEEGTHMIEGIGDDFIPGIVDKNLIDDIVLIDDLDAINMSKRIAKEFGLGIGISSGANFLAGVLINTSDIKIATVFADDNKKYITTKLSEEIDDDPNLISNKIKLINFEVI

SEQ ID NO: 11186 - protein, 294 aa, Methanobrevibacter gottschalkii
MVQYCRKCGKELEDDAEFCDGCGFNLNNHPTEDKQELNKKIKQTSQKDKNDFITKLPLSLAIISIIVVIAEGLGTPMIMGWDNIMLAIAIGIIGGIIGIILMEKIDEPLIASVEFIATGALVYSFIGRFGDISLIIFIITAILTLYFKGHSANNKKLWTIPILTIVLLFVLLIASGALYQINAENSVIVGNLSQNITNDGYGYYNGYVTGDIKVDSSFDYLCVNVNFLDNNGKVIDSTIGWNDLNPQSGKTYKISAWYFEQQAPEKAEISVVDSADSTTPLYTENITISTSSGV

SEQ ID NO: 11187 - protein, 907 aa, Methanobrevibacter gottschalkii
MSTQSEAVLENNLIKRLSENGYEFVKIRNENDLLANFRVQLDKLNKCKLTDEEFNKVLLFLDEGSIFDKAKKLRDHYYIDRKDNPFYIKFLNQKDWCKNIFQVSNQITMESKHKNRYDVTLLINGFPLVQIELKRRGMPLKEAFDQITRYTLHSYKGLFNYIQIFVVSNGINTKYFANGLKNDLQFEFTFYWKDEKNNNILSLDDFANTFLEKCNLAKMISKYMVLNESSKRLMILRAYQKYAVEAVIHQALDIKQNGYVWHTTGSGKTLTSYKVSQLLAEDESIYKVIFVVDRRDLDIQTNKEFNSFCDGCVNTTKHTGALIKNLTTEGKGKLVTTTIQKLSKAVKTAGDKVKLQKIKDKKIILIFDECHRSQFGEMHNVITEFFSNSLSFGFTGTPIFAKNSDGTRTTKDIFGKKLHEYVIKDAIADNNVLGFSVDYVGGAKSHTDIDKEVKKINTKEYLESDNRLNQIVDYIIESYDSKTRNREFNAMFTVSRGGVIHNYYELFKKKKHDLKIVTIFTFKANEDLSENEHSQDLLDKYILDYNKMFETNFTSDDFKQYHADVSKRMKNREIDLLLVVDMFLTGFDSKLLNTLYVDKNLQYHGLLQAFSRTNRIVNKRKSQGNIVCFTNLKDNVDEAIALFSDPNAIEDIILPPYETFVKWFNEDLKRLFKLVKTATEALDLQSENDKKKFVLIFRDLIRNKNKLDIFTEFNWDDVKIDEQEFNDFKSAYLDIYDEFKKDNEDGESVLGDIDFELELLRNDQINVDYILNLLADLDKNSTSFKHDKQRIISLMKEHENLRSKIDLIEKFINEKLGNIDSKVTNINEEFDKFMKHERKQAMCEIVDEENLNEDVARQIFEYFEFSGKIDEELIKQSLVEKLKFKERKAKVNTIKFKIFELFEKFDY

SEQ ID NO: 11188 - protein, 184 aa, Methanobrevibacter gottschalkii
MIVKKLEDIAEVFSGVQISRFIDLNENKFPVIKNKFVEDEILDYHYENISKNINKKYYSKKGDIIISLSQPNTVSLLQKEGFIIPMYFAIIRLNEGYDSSFIYHLMNSDLFHNKLHVLLEGGTLRVIKVADLKKMKINIPNFEKQNDYGKFLDLIDKKCKLLNYKKSCNEKIKEYLIQTQLKGE

SEQ ID NO: 11189 - protein, 514 aa, Methanobrevibacter gottschalkii
MSDYQNNLESKLWAIADELRGNMDANEFKNYILGFIFYRYLSEKLELHMNEELKEDELSFTEAWDDEEYKDDLMDEGISSLGYFLEPQYLFSTVIEKAKVNDFILEDLIKSLNYISNSSIGTDSQDDFSNLFEDVDLNSSKLGKSDDDKNKLISKILLNLNDIDFKLGDDESDILGDAYEYLISQFASSAGKKAGEFYTPQEVSKILAKIVTLGKKKLRNVYDPTCGSGSLLLRVAKEVEVGDFCGQELNQTTYNLARMNMILHGVKYVDFDIKQGDSLKYPQHIDMNFDAIVANPPFSAKWSGDKSFLDDERFSAYGKLAPKSKADYAFVQHMIYHLEENGTMAIVLPHGVLFRGAAEGTIRKYLIDEKNYLDAVIGLPANIFYGTSIPTVILVFKKCREEDQEVLFIDASNDFEKVKNQNKLRSEDIEKIVNTYANREEIDKYSHKATIDEIRENDFNLNIPRYVDTFEEEEPIDLNEVVSELKMINEEMKKVDAEIKKYCDELGIEAPIFD

SEQ ID NO: 11190 - protein, 374 aa, Methanobrevibacter gottschalkii
MSEERLVPKLRFSGFSDVWESYKIGDISKTYSGGTPSTSKREYYEGDIPFIKSGEICKDKTEHYINEIAINNSSAKKIKKGDLLLALYGATSGEVAISKIDGAINQAVLKIDNNMDNYFQYNYFLKYKDKIVHKYIQGGQGNLSANIIKKLEFKFPKLDEQKRISQFLLLMDKKIDLLENKLQYYQDFKKYLMQRIFTQNLRFDFDNVKLKNISKINKGKQLNKDDMVETGIFHVLNGGKEPSGYTNAWNTPENTITISEGGNSCGYVNFNTEKFWSGGHCYYLDNLAEKVDGYYLYSYLKFIEPKIMRLRVGSGLPNIQKGDIENIKVKIALPTEQQRISNLLYSTDEKIINIANQKDNFELFKKGLLQQMFV

SEQ ID NO: 11191 - protein, 386 aa, Methanobrevibacter gottschalkii
MEFTDNWQTYKLGDILTFYSTNSFSREKLNYEFGNVKNIHYGDIHTKYPTIVSLQNNKDVPFINEDIDLSKFNEDQYLQDGDLIIVDASEDYDDIGKAIEVMNVNDEKFLAGLHTILARDEKNITVNGFKADLFSTNTLKTKIKVIANGISVLGISKKNISKLEVKIPSKREQQEIVSFINTIDRKIELLEEKHQYYQDFKKYLMQQIFTQNLRFDFDKEWENIRLKDFLKSSSSSLSLNDLEENHGEYGLYGATGIVKLINFYEKTEPYLSIVKDGAGVGRIFLCEPNTSIVGTMQYLTPKEGVDLEFSYYLLNTIEFRKYVVGSTIPHIYFKDYSKEKLLVPQIEEQQEIASILSNIDNKLNLIQDRINHMGQFKKGLLQQMFV

SEQ ID NO: 11192 - protein, 331 aa, Methanobrevibacter gottschalkii
MKTRIINKIKSKMKLYLDENQLVILDETLRNILKDYDLVETESEFTIKESKENSILLMNFLASKHVEGCSERTITYYHTTIAKMLESISKKIEFISTDDLRKYLADYRKVNGASKTTVDNIRRVLSSFFSWLEDEDYILKNPVRRIHKIKTKKVVKEVLSDEHFEVLRDNCDNIRDLAMIELLASTGIRVGELVNLNIDDVLFNERECVVLGKGDSERIVYFDAKTKIHLLKYLESRKDNNPALFVSFKKPFKRLGINGVERRIRELGNGANIKKVHPHKFRRTMATNAIDKGMPIEQVQKLLGHVQIDTTMQYAMVNQNNVKIAHRKFIG

SEQ ID NO: 11193 - protein, 556 aa, Methanobrevibacter gottschalkii
MDAGKLQLLYFLSQNQQLSIPIYQRKYSWSEKECSQLLEDILRVGESDEQNHFIGSIVYMNQKGHIASPINSLMIIDGQQRATTITLLISAIVEFLFKNPNDNVMSPENFISYYLLNDREKGETRYKLILTQDDKRTLIKIIDYLETSDEIPFDSNDSIRIKENFEFFKKKINTDNIEILFNGLNKLLIIFVALEHNIDNPQLIFESLNSTGLELSQVDLIRNYILMGLVPEEQEKLYNDFWHEIETLFEKNEGNFDKFIRDYLTVKTDKVPVFRNIYSDFKKYSAQIDVKELVKDIHKYAFYFNSIAFGAEENPKLKESLDSLNSLGYDVTDPFMLHLYRDYKENKLSTDDFCEIIKYTESYLLRRLICSIPTPSLNKTFAGMYVQIDNTSHLSSYKAILRSKENYQRMPSNREFVANFRQRDIYNLRSKNRDYIFDKFENWGSKEKTNIQNYTIEHIMPQNPNLSQDWKLELGEQWADIQKTYLHTIGNLTLTGYNSELSDRSFNEKRDMAGGFKDSAIRLNIYLQDLNNWNENEIKLRTNRFVEKAKTIWPYP

SEQ ID NO: 11194 - protein, 274 aa, Methanobrevibacter gottschalkii
MVRFSQTLDDKQSKNREKSYRQVMENPYHASENRQSYSAQNEDRFYSQPSVQRSNYHEDNFHSQKDEVIYEMSVIEKESVKPDYSKPELKFPADQNIQFGVEYAPNSKPPVIGRNYTIRSNSIIYNDVVIGDNFRTGHNVVIRENTNIGDDVLIGTNTVIEGDVIIGNDVSIQSNVYIPTNSVIEDNVFIGPCACFTNDKYPVRINYELQGPKVRRGASIGGNTTFLSNVEVGEGSIVAAGAIVIHSVPPFYLAIGTPARIKPLPDHLKVPNKF

SEQ ID NO: 11195 - protein, 53 aa, Methanobrevibacter gottschalkii
MAKYKCKICGYIFDEDNIEEGLNIPEGTKFEDLPSSFKCPKCGMPKSMFMKMD

SEQ ID NO: 11196 - protein, 39 aa, Methanobrevibacter gottschalkii
MAKFKCKICGYVTEEFEELPEDFKCPMCGATADMFEKIE

SEQ ID NO: 11197 - protein, 36 aa, Methanobrevibacter gottschalkii
MAFICKVCNFVLEEDELPEDYICPVCGVGAEHFEEQ

SEQ ID NO: 11198 - protein, 199 aa, Methanobrevibacter gottschalkii
MKTIKNAIQSEINVKKSQFICSLVPTETKAESKAVIQKFREQYSDATHNCTAYIVSDGEGFDDDGEPGGTAGKPMINVLRKNELHNVTAIVTRYFGGIKLGAGGLVRAYSKSVMEAVGEAEILEIEEYDVYKLIFEYSNIRIVDSEVRNNNLEVINKEYSDKVSYDIVSKDGRDILKIFEKYSGKINTGFKNKQFLENK

SEQ ID NO: 11199 - protein, 139 aa, Methanobrevibacter gottschalkii
MIFLPGSKSATFLVIFIVAIVAFCIACVCASMTGQISILPNDNESESILDNLSAITNDTGNSGQSYGSKDYSSSSSSSSSNDDSQVETTTDHSGDNQGDSQKDSDDHDHENSNQNNKDKDTKTDSGHAGQGSGDANDFD

SEQ ID NO: 11200 - protein, 230 aa, Methanobrevibacter gottschalkii
MAELRYRAGNIRNPEVHKIGIIALGSHLENHGPALPIDTDAKIGAHIAFQSSLQTGAKFLGIIFPAYELDTIDHGVHVSLETLKENVIRTLNDAKKFLDIEKVVIVNSHGGNIPLMSELWDIEDKTDMIVVFNNKVISSEGPHGGSGELSMAKVLGIVNENELDNQTNVNEYEEVGLYGFKQARRDDPNIEEGARDVEENGVYIDEEYGERLFTLAISSVLFDVEKLLDF

SEQ ID NO: 11201 - protein, 160 aa, Methanobrevibacter gottschalkii
MVVKVKKRNFLKKKKIKEIKAELGEYGNLLQGKKNVEILEAEPNSFILVDGEPYIILIDERPFPTLKAALDNEIDAKTVTVDMGAIRFVANGADIMSPGIVAASEGVKEGDVVLIIDETHGKPLAIGVSLLSGEEMVRNDSGKAVETKHYVGDDIWNFEL

SEQ ID NO: 11202 - protein, 165 aa, Methanobrevibacter gottschalkii
MNFNREKYIDLIMYILLKCYSKPNLGKTVLCGILYFIDLNYYEVYGKFLTCETYIKSKKGIEPKHFKEVTEELIATDKLFLRREAYYNRIIHRYYLTIIPQFKFSKKELEIIDASIKRLKDNNASSITRYAIKDPPLHIANFGEDIDYKYVFSRNSAYSAIKNFL

SEQ ID NO: 11203 - protein, 76 aa, Methanobrevibacter gottschalkii
MSGQNVQRPLDALGKSVDAPVLIKLKGDREFRGILKSFDLHMNLVLNDAEELQDGEVTRRLGVVLIRGDNIVYISP

SEQ ID NO: 11204 - protein, 62 aa, Methanobrevibacter gottschalkii
MSKGTPSMGKKNKKTHIRCRRCGRNTYHIRKKVCASCGFGKSKKLRRYSWQNKKPTTRQRLV

SEQ ID NO: 11205 - protein, 463 aa, Methanobrevibacter gottschalkii
MKYDKSLIVLFIIQICEGFSFYGLGAILTLFMTQFLNLSLSFAFLVYGTYFGLVYIATLFGGYLSDKYIRSRCLINAGIILMGLGFIVLSYFASWANPLVQTHSYFYFNTPEIMLIISLMSIILGEGLLRVNISSTVKQVYEDNEKKVESAFTLLIMALNIGAVSSAIILGLTIGEGNLSLYKYGFLILAVSLFIGIIIYNLFRNKYLVNSKGEIVGIKPSIKLESVMDNAEEKLTKQERNHVKAIIIILSISLIFFIGFEVIDSSLMFFAKDYVANTIPFVPFRISPEIIKFIEPFGVIIFSPFILTYFNLKDGDENESLIFRIMLGIIVLLVTYAVFFIPCMMVDNNMTDVSIIFIIIMELIRSTSEILILPIGLSIVSKLSPAKYLSRLLGLFYCSLAGAYVVSGYMAGFYPNAESMAHKLFGLIQINDFKIFASVFIVMYLTLFTATYISRNKIRDLME

SEQ ID NO: 11206 - protein, 332 aa, Methanobrevibacter gottschalkii
MNNPNIILKMIFMKKMKGVLLEASAIDKGDISWEELSEHVDLTIYENTTERNKFEHIGDAEVIFDNKVIIDEEVFRKCPNIKYVGVCATGYNVVDMTAARKRNITVTNVPAYSTDSVVQLTWALILEQTCNLELHNQSVKNGDWINSEIFCYWLKPISELSGKTLGIIGYGNIGKKVATIAKSFGMNIIVNTDHPEKYSEENINFVDKDEIFAKSDIITLHCPLTEDTKDIIRKENIDKMKNGVRIVNVSRGGLVRENDLADALNSGKVLSAGVDVVVTEPMSEDNPLLDAENIIITPHIGWASIDARKRLVDEIIKNYKAFINNEKRNVVN

SEQ ID NO: 11207 - protein, 304 aa, Methanobrevibacter gottschalkii
MSKENIEKNEINNSNAPILYKRHEDYIPRVAAIHDLCGYGKCSLGVAIPVLSAAGCDVCPVPTGLFSNHTGYPTWYMHDTTEILNDYLNTWKEIDIDIDAVYSGFLGSDEQVEVIKSVYETYPHALKVVDPVMADHGQVYPTYDDDLCQAMASLACEADILTPNLTEAAIILGEPIGEKWRGANIDDEEAHRILNALLDHGAKYVVLKGIQREDGIIRNFVGGKDMDISEASNEFLPYMLHGTGDLYASSLLAAVMVGKDLFESVEFAGNITHDAMIVSSKQPNFQDRGVNFESLLGQVTDLFI

SEQ ID NO: 11208 - protein, 279 aa, Methanobrevibacter gottschalkii
MMRKVTHKTKGQKAIDGAGVHLVRVLGNTTTDVHDPFLMLDAFDSTNPDDYTAGFPMHPHRGIETITFVSKGQMLHQDHLGTEALVGDGEAQWLTAGSGAEHAEFPGGERMLGTQLWLNLPAKDKITAPPAYHSITTDEIKEFSLDGGFLRLMAGEYNGEEGWQGKYLPVDFYDIHLEPNTKVEIPVKEGRSAFVFTLLGDVVISGDVVLEKTAAKLSDGDHVIFETKDNSAEILLYSSKRLDEPVAWAGPIVMNTREELNQAFEDLANGTFIKKQAEY

SEQ ID NO: 11209 - protein, 135 aa, Methanobrevibacter gottschalkii
MVELKDIAQENEVDLENCVVFVRGEDDILAVDVSNAKIRQRSDDTMGFTFSITPEQTLKFEEYFNKFANGEKFYFDISQTGYRPAYYRGLSQINKEVSEEYDTKFNVTLFAQKAIVEPDDSYFAPTCACCQFCHL

SEQ ID NO: 11210 - protein, 150 aa, Methanobrevibacter gottschalkii
MIHILHQLVLVANSVIYKGDIMFDSPFSNYIVLTRNKTNESIKLDQRRVKLRENKNGLMALSYIGPLFEIMDLEDFFDDMISSEKLSMDISETGEFRVSFRGIIDGKGKNFPQNLDHKIILLQEPTCLDERVNIQETGFSKFKLKNEVSE

SEQ ID NO: 11211 - protein, 134 aa, Methanobrevibacter gottschalkii
MLSQFIYMFIKTKLKIKTRILVNMIINWQEEITRIDPEMKFRAEGGWLKTIEKLDKSVKNGYSLVGDFVKAGDFEENYDEGIYLDCNKEKTGRKTQQDYRLFRFRDGKVRLLDMVIDGENGWAVDLWDAVEDEL

SEQ ID NO: 11212 - protein, 223 aa, Methanobrevibacter gottschalkii
MNLYEKFGIKTDNKVLYDTAFTHGSYSTKHDLKYNYERLEFLGDSVLSVIVSEYLYEKYPHYEEGKLTKLRANYVCQFALIYYSHELGLDKYLKVAAKESNLTKNEILSITADIFESFLGAMFLDQGWYFVKRFVSNSIFKFIDANVIFFADYKSAMKEYGDAKDLEVSYKILKECGVPHNKTFITAILIDGEEMGVGKGKNKKEAEQAAAKVAIEKLNIKVF

SEQ ID NO: 11213 - protein, 488 aa, Methanobrevibacter gottschalkii
MNKESVGIVETEYHDISNPIILDSGETLDEVTVAYETYGELNKEKSNAILICHALTGDAHAAGWHEGDKKPGWWEMVIGPGKALDSEKYFIICSNVLGGCKGTTGPSSISPKTGKEYGVDFPVITINDMVKVQKELIDSFGISQLAAVIGGSMGGMQVLEWMVSYPRMMKKAIAIATAGRSSPQQIAFNTVGRQAIFSDSKWNNGNYYDTCEIPSNGLSLARMIAHITYLSDESMDIKFGRGLQDKDEISYDFSVDFQVESYLKHQGETFVKRFDANSYLFITKAVDLFDLSANDSLIDGFKNVEAKIKIISVDTDWLYPTEQSMELVTALNANDVDVSFSEIKSNYGHDAFLLERGQLNYIFSNFLSENVVDDLMIEDIATIRENADIVEAAKLMLDKHLTHIPVVTDDCKLIGIVTSWDLSKSIATNSNHLKDIMTKKVKYCHANDSIEEIARKMRKFDISCLPVVDEEMKVLGLITTDQISNLLS

SEQ ID NO: 11214 - protein, 207 aa, Methanobrevibacter gottschalkii
MGIGYAAIAIKAGMTPLQTISMSVLVYAGAGQFIAASMILSSASVLAIVLTNFVVNLRYFVMSTCVLNQIEDSNLPLNVLAAHTTVDESFAVFSLSEDSSIWVYLGIAVTAWLSWILGAAIGVVVLDLLPVIVTNSFNISLYALFVAILTPAIKENKQIAILVAITAVLNIILSQFLGNWSLIVSTLVGAAIGMYIVDDEYLLSGDA

SEQ ID NO: 11215 - protein, 104 aa, Methanobrevibacter gottschalkii
MDYMMLVIVGCTLVTFIPRLIPALFIDKLNFSPKFEKFLDLIPYTALAALICPGVLTVDNQLWYIGLIGAVVAACLAWKKAPMGAIVIITVVVLIAVYSIVPFF

SEQ ID NO: 11216 - protein, 78 aa, Methanobrevibacter gottschalkii
MRTMIKYLRQELKMSQKELGNKVGVTRQTINALENGRYNPSLFLAYDITQVFNKMLFKGDKEQYFVMEDIFIFDEDYY

SEQ ID NO: 11217 - protein, 243 aa, Methanobrevibacter gottschalkii
MILDIYKDAFEYSAKDWKTLLILGVICLFSFLLIPVFLLAGYNYRVVGTAVRGIINGKDPLPEFDDLIGMFIDGIKVVIVQIVYLIVPAVTFIVFVLIANHLSGVLASAVVLLGCLVTLILGIIACLMIQMGICHMAYNDGAFTKAFAAEEIKAVINEIGLFKCLLTYVGIIIICVVFGVVVTGIVGIIFTIFGLSGAMLGVDAGGILVLGTLVNSLITTFVVGPYLSIFTGRSIGLLYTMQI

SEQ ID NO: 11218 - protein, 274 aa, Methanobrevibacter gottschalkii
MTSITDCVVEGLKYPFNDLKKVLSFGVLFALINLISLDITTKFIDAVIKYSKLYPSASNVFHLSQLPANDIYMIIALLIISFIIVLFINGYEWNIVRFSIDKKEDLPEFSNVLKMFVNGVKYFLVNVAYNIIPIVLLIIGLALFNESYSPIIILISVLLFLIAYFILIMALNNMVAHDSIKKAFDLREITKNISNLGWGKYIGIIVFTLIVYLVIMVAVGVILFFITVFIISAITDQSMIISIFLAIIEGLFILPYVEIFFSRVFGSIYRESIK

SEQ ID NO: 11219 - protein, 210 aa, Methanobrevibacter gottschalkii
MDVFQHPIFLLGELMNINVELFYLFNHAFQNPFFDYIMPVFTHFGGFKFLILVLIAIVLYAHLRNKRTLRKIIFLTLIALLFSDGIAFVLKHLIHEPRPFLSLDNVHLLIAEDDPLSFPSGHTTSTIAIVTFLVFNMKELAKKHYKIINVCLIIFAILIPFSRMYIGVHYPGDVLAGAAIGIVGAVIVNHFKCEILNRIDILNKIKESIS

SEQ ID NO: 11220 - protein, 91 aa, Methanobrevibacter gottschalkii
MNNFENQKFCQSCAMPLESSDFFGTNADGSKNEDYCIYCFKDGEFTSDMSMDEMMNFCIDKMTEVHPDIDKQQATAMMGEIFPKLKRWADD

SEQ ID NO: 11221 - protein, 481 aa, Methanobrevibacter gottschalkii
MCSIVGLQGNVKAEDILKMLKVSKSRGPDSSGIYLDKLYKNINLDEFEDDNTYPIAFGHNLLSIYDLNNRISKLQPVTDDNLVLLFNGEIYNFKTITNLLSKVGVEKEILSDAEALLYLIDFYNKGDLVKAIQNTTRLFDGDYAFAVFDGENLALVRDPLGVKPLFYGENDKLKGFASSKQSLKEVGITDINTLKPEHILFNGQDISPAQAVHEKVFEGDVAKIEKMLRLSVLKRVEDINEIGVIFSGGLDSSYLALLLKEISENVPLKIKLYAVGVKGSKDVEAAVYASKFLNLDLEICEVTEKLILEALPSVVKAIGDDNLMKVGVGLTTYFATKMVACDGVKVAVSGQGADELFGGYKRYLQSFVDGTLNYDLREDMSNMYHVNLERDDACSMLNGVELRLPFLDKTLVELVLNIPDNKKIVSMHDDMRKSILRKLAFEGGLDYEIAYRPKKAAQYGTGIDKILRKKIIKDMDISQFL

SEQ ID NO: 11222 - protein, 71 aa, Methanobrevibacter gottschalkii
MTIEKDAEDIIEKFSKILEDIPDSDETWYITDNLNLTRDDKSQEKNPEKILRNARIDKEGNLIVKKADWTN

SEQ ID NO: 11223 - protein, 161 aa, Methanobrevibacter gottschalkii
MRINLVLELLDAPGQLVKALEPISTYGANLVTIIHKRDYKNDNGMVPVQLTIEGERNDLKNVVDKYEELGFTIIEMDGVVKKEKITTILFGHIVDQDLRDTMDKINQIDGVIIVAFDIKLNGEEKSTALINIEADVGLKQNVFDRIAEIAEEKELLVINEV

SEQ ID NO: 11224 - protein, 339 aa, Methanobrevibacter gottschalkii
MDECKVIIMGFGSVGQGVAKAISMKKDLIKDKTGVDIKVVAAADSSSSAISQEGLDEELLVKTKKEEGKLSAYPEFGSDKNGADILDAVEYDCLIEATPTNIVDAEPALSLTFKAFEQGKDVVTSNKGHLALKFREVVEAAEKAGVEFKYEATVGGSMPIINFTKETLASCEIKSIKGILNGTTNYILSRMTSEGSEYEVILKESQELGIAETDPTQDVEGIDAACKTVILANSLLGIDATYSDVKVEGISKINSQAIELAKKDDYLIKLIAEVSPDNLQVSPRLVKRGSSYDVSGTLNMATIKTDLANEVSVIGLGAGSLETASAMLTDLISILKNKI

SEQ ID NO: 11225 - protein, 403 aa, Methanobrevibacter gottschalkii
MKYVIFIPDGSSDLPLDEINGQTPLKVANTPNIDKLAKAGYGGLTNNVPEGYTPGSDVANMSIFGYNPADYYTGRGPLEAGSVGIETTPCDVIFRCNTIFEKNGKMEDFNAGHITTEEADVLMKGLNRYFNDKYPGFKGKFYTGISYRHLFVYSCDNVEDAEILANLKTMPPHDISGENLVDNLFGDCELAREIQNIMFESKEFLKTQEINQKREIPANMVWLWGQGVTPKLLNFKEKYGLDAAVITGVDLLKGIGVFAGMEIIDVPGATGFFDTDYEAKGKYGIEALKRNDVLFIHIEAPDEAGHAQLLDEKVKAIEQIDKFIVGPILDSLEGQDYRAAILPDHPTPIDIGTHTRDDVPIIMYASDMEGDDCVAFDEVSVLNGSITKKEGYKLMQRLIDGDF

SEQ ID NO: 11226 - protein, 211 aa, Methanobrevibacter gottschalkii
MKVLLVNGSPNRKGCTYTALSEVANVLNEHDIETEIFWIKTKPITGCTACGTCATIGKCTYDADSVNEFVEKAYEADAFVFGSPVYYASANGSMVSFLDRAFYSNSHGKGAEAFKHKPGAVICSARRGGTTATYDQLIKYLGISQMPIISSFYWNMVHGNTPEEVLQDEEGLGTMRQLAHNMAFFLQCLEAGAEKGLKVTEEPKPRTNFIR

SEQ ID NO: 11227 - protein, 451 aa, Methanobrevibacter gottschalkii
MNIFKTPEGYIYSNKALLALFIPLLIEYALEFFVGFADSIMVASLGEAAISGVSLVDFLIQLLIFSFSALATGGAVVAGQYLGNKQIDKAQDSATQLVWFSTILSVILMIIVIILRQYLIGILFGQIEVDVWQNADKYLYIVALSIPFLAIYNAGASIFRTTNNASLPMKILFICDILNIVGNAICIYYLGWDVHGVAIPTVISRLLSAILILHFVVNEDYKLHIKRTLIHKFDFKILRKVLQVGIPYGIENGLFQLGRVLVLSIVSTFGTMAIAANSVGYAVGIFSVLPGFAINLGLTAIISRCVGANDYEQVRYYNKKCLIIVFVSHIVINLIIFAALPLILNIYNLSAKTAAMTSEMIIWHGIFGIIIWPLSFTLPATFRGAGDSKSVMYISLIVMFTCRIALSYVIADFMGVGVFGTWIAMFIDWYVRAAIYIYRYFSNKWTEYRVI

SEQ ID NO: 11228 - protein, 135 aa, Methanobrevibacter gottschalkii
MDGIVYKNTHNFSKRELEELFLSLEWSAGHFPDKLIIAMKNFKTVFSAWDGEDLVGLACAMDDGIMNAYVHYLLVKPEYQLKGIGKELLNRITTHYKDYMRIVVVAYSDEIKFYEYCGFEKADDASPMFITKLWA

SEQ ID NO: 11229 - protein, 257 aa, Methanobrevibacter gottschalkii
MVLFRGDIKCKSLQRRTSISVILPADNIHFLSDTEEIVPQPYKTLYLLHGLYGSDDIFLANTSIQKFAEDHGIAIVIPCGENSFYLDNKKAHAYYGEYVGQELLDITRNIFPLSDNREDTFIAGFSMGGYGAIRNGLKYSKNFSKIGMISAALITDEIVDYTDDDNVLWSNSFYKSCFGDLDKIKNSDKDPKYLIENTADIPDIFMACGVDDFLYDKNVEFYEFLESKDINAEFMQSPGEHTWDFCDRYVKEFIKRL

SEQ ID NO: 11230 - protein, 147 aa, Methanobrevibacter gottschalkii
MKCPECGNELDEDNYCSECMEFIDNPIGGRLCPYCGEELDEDNYCNSCMQYYYEEENTQELEEIDYDSMVNNGDSICLNCTFWSVSPYGSAHGMICRKGQISDGPGDSCGLFVQEYNFANYGDAGQYQFNETNRAISNKLYHWKNSG

SEQ ID NO: 11231 - protein, 538 aa, Methanobrevibacter gottschalkii
MERIFLTKYIIITGGVVSSIGKGITSASMGRILRSYGLNVSAIKIDPYLNWDSGTLNPYQHGEVFVTSDGMETDLDLGHYERFLDVELKGLANITTGKVYESVIAKEREGGYLGECVQVIPHITNRIKEMIRENSESADYDVVLVELGGTVGDIESQPFLEALRQLRNEEGRENVMFVHVTFIPYLDAAGEFKTKPTQHSTKELRSVGINPDVIVCRSQKPIDDGLRGKIAHFCDVDFEAVVNTPDADTIYEVPLVLEEHSIGELIVKRIGLNIKPDSSKLNEWREVVKSLKIKEPKVNIGIIGKYVELEDSYISIRESLLHAAASIGVKANIIYLSSDVEELDQDAMSELDGILIPGGFGERGFEGKLDAIEYAIENNVPLFGICLGMQSMVTQFARRNGFSGANSSEFDDDLKFPVIDMMEEQKKIKNMGGTMRLGSYGCKIIEGTKTYEAYGESDIEERHRHRYEFNNDYRDGLQEKGLIISGTSPDDFLVEIIELPNHPWAVGCQFHPEFKSRPNRPHPLFKAFLEAIHDYSKN

SEQ ID NO: 11232 - protein, 288 aa, Methanobrevibacter gottschalkii
MIITTIFLIQIIITVLFSIMAAIYDIKSNIVPNKLNYSLIFFGLFSNLILSIISNNIKYILASFISMFITYAVTYMLWKLNIWGGGDVKLFTAIATVIPSGLNINFLNIFPQLSVYPFSFSVVINSILVSFPFLVIFVTHLIFKNKVFMGNIDFLVNIFNIESLKYIKNSTLNKLIPIKDLKEGMIVNDYYFNNEHIIELLSEMGGNLEIYKSNRNDFKYYFKSQSAGGITNEEVWQLKIMNSQDIISDNISIKLSFPFAPAIFLGLVIAIVYGDMMMLIIKNIFLVI

SEQ ID NO: 11233 - protein, 142 aa, Methanobrevibacter gottschalkii
MVKESGAQISLEYMLIFSISLVILIVFTLPLAENSIRNTLDVSDSLNVKSDLSKIANAIKQVYGEGQGSRQTIKIESNKKLKINIANSHVSTSFKLKSNSKKDIKEHVMSNIGKTTISLNKGENVIIVEWPVNSKNMLIYTV

SEQ ID NO: 11234 - protein, 267 aa, Methanobrevibacter gottschalkii
MDIITTIIYLVLFIVMMVFVFSIGMLRQYMPKREVILVILVAFLIGSIGGAFFLDPIYDELPNVASVIEKNMPNNEETLYLDLSSSINIDDLKNNLSATDGFISFDEKSVNIPMWTFNEREHNYFDEIVGNIDSNYKAYNISTSEIQITLADNYTSAQALKSFSDWYKLVYGETISYAQVHAVLVVDSSSLDTFEHILLQKGIVASKIEGPIQDTVNNTNSSMLTNIEFTLVCGGIGVVVAFMGIYVDSVVPAYRKFRKFLREKRRR

SEQ ID NO: 11235 - protein, 229 aa, Methanobrevibacter gottschalkii
MNVAVLFSGGKDSTMALYNALDSKEDVKYLLSMKSRNDESYMFHVPNIHLTDLLSQAFDIPIMSVETDGIKEDELKDLKQAFENLKDLGVEAIYTGALYSQYQKSRIEQLCDEVGLVAISPYWHVDELEYMRKIVSLGFKIIISGVAAWGLDESWLGRIIDDETIDELMEIHEKYHVDLAFEGGEAETLAIDGPIFKKRIKILKYKKEWHNDSGVYIIEDAVLEEKMNL

SEQ ID NO: 11236 - protein, 179 aa, Methanobrevibacter gottschalkii
MQVMGISGLPGSGKSLVSKIAIERGAKIVSMGDIIREESKKRGESTKETAQNLRAEFGQYIVSELTIKKIKKLQEEGFESKIIVEGIRSPHEVNMFKKNFENFIILSIFANPTLRFERLKNRMREDDSTDYVEFKARDQMELDFGIGDVISLSDKIIINETDLESYTNSINKFLDEIEL

SEQ ID NO: 11237 - protein, 245 aa, Methanobrevibacter gottschalkii
MIPKSHPRYESLLLRDKMVKASKEGYLADSALIAHGRGEAFDYLIGEKTTYPAKRAMYVAVAALLLSNNPVISVNGNATALAIDEIIEFANAINAKIEINLFYKTNERVKIITKLYEDHGYRNILGGLDDDIEYINDIENNRASASKNGIYTADTILIPLEDGDRAEILKKSGKNILTIDLNPLSRTSKMSDVSIMDNIVRAIPFMTQIANDLKTQDKKILVELVNEFDNEENLKESLEQIKVKE

SEQ ID NO: 11238 - protein, 127 aa, Methanobrevibacter gottschalkii
MKIKLAIIFGVLIWILTFVLSATFNPIFTTNVRNVNIVVPIITIIVTGFFGILYIRAIDTNEIVEGFLVGIIFVIIDIILDYIFIISLQKNLYIIGNYTLHVFSMITITLLITTFLGYLAQMTIDLK

SEQ ID NO: 11239 - protein, 344 aa, Methanobrevibacter gottschalkii
MNAYIEHEKYLKNTLLGLNNSSDSKQKEKSLSSHYFKDLKEKLLIQYENKSLKDVMDCNICNTSFGDALKITTKEKIDFNIYDNNFKNQINHNLKLLPKIGLKTEENLKNKGYMTIESLKNHDKYCDTASKFLNKIDDMSFHEIMDLLDNNRYSKKCRDNLLKCISLTDVENFKFMDIETKGLSNVPIILIGVAEIKKCKIISSQYFLRDYTEEQNIIEAYLNHLDEDSIHVTFNGKSFDVPFIRNRCIYNRINHNLELPHLDLMYFAKNLWKGSLPNFKLQTIEEEIFGITRYRDVPGQYIPGYYDTYLSKKNIGPVVPIIQHNCQDIISLASFLEKMYEDVN

SEQ ID NO: 11240 - protein, 500 aa, Methanobrevibacter gottschalkii
MGLFDRFKKSDKKEKKLIPDNPEIEDEELRLKEIAINHKDRLERAQAADKISNEFLALDMAKTVKDRAIRLIAANKLKDEDLLMDAALNSQFFDVRSFAWERLGENNKSIAEIVINTKKNSHVDEIFNKIVDEETLKWIAIEAVDKRYRTRALNKIDDAGILYDLVFKSNDSSIKKAAILKDSFVSEDILKKVAIEDKDEGVKKIAIGKIKNEDSLVLIAQNEDNAKVRSFIFDKINNPENLKHIILDSKKADVKTELINKITDSDLLAKIALEDNDNIVRSEAVKKITDEEILIKIISTEKDRFVRQIAVKNINNPKELIKIALNDDDQFVRNHAISNSALADEKDFKYLAINSIHEDVASEALNHINDENDFIDILKNAKLTSIRKNTLDNISDLETLIRIILSNEDEEFSLKALDKIKVEKCLIKIYEQNISENISIRAISLIRNQKYLGEVARNDSSWKVREAATKKVVSRKVLKEISNNDENEYVRNIAKKKLKL

SEQ ID NO: 11241 - protein, 252 aa, Methanobrevibacter gottschalkii
MKKITRIFFSPSGTTKKIVDKIATNFKYEKEICDLLHFNDTKEFTDSDIVIVGMPVFSGRIPKTARNRLLKLTGNNTKAIAVANYGNAKVGDALIELVDILKENNFDVIAAISTVSHHSIFNGVAVGRPDTADMEKINEFGQKCVEKLESGESLNSEVPGNRPYADYKQLPFIVSCDQNKCIFCYDCVTFCPENAIPDEDPADVDLDICSRCTACIHICQEDARSFTGEAFETKKPVFESENSERKEVELYL

SEQ ID NO: 11242 - protein, 343 aa, Methanobrevibacter gottschalkii
MMELMRELSLTPGVSGSEEKIAEIITRELKDVADKIETDSMGNIIATKKGEKKAPTVMLASHMDEIGLMVRYIDDDGFIKFSNIGGINDQMLMNQTVTVHSSVGEPIVGVIGSKPPHVTTAEEKNKVVKSTDMFIDIGAKDKEEAEKMVRIGDKMTFNSLFAEYPNNLIMGKALDNRVGCYVMMEVLKRVDTRATVYGVGTVQEEVGLKGAKTSAFRLNPDLAIALDVTLSGDHPGIKPEEAPVVMGKGPAIILADASGRGILTQQSVKDLLINAGDENEIPYQLEVSDGGTTDGTAIHLTREGIPTGVLSVPTRYIHTPVSVCSMDDVEATIQLITEAINNL

SEQ ID NO: 11243 - protein, 161 aa, Methanobrevibacter gottschalkii
MNIELESIGTIHTEFKEIEGMPIQPTGAKGIKGTIEIKDKFVDGLKDLKDFSHIHLIYLLHKVEGYKLEVKPFMDTKTHGVFATRSPKRPNRIGMSVVKVNKVEGNKVHVENVDILNGTPLLDIKPYVPQLYEDTIDELKIGWFESKHQKAKSQKSDDRFK

SEQ ID NO: 11244 - protein, 68 aa, Methanobrevibacter gottschalkii
MQLSARNQLNGKVTGVEKGAVMANIKIEVSEPSTITAIITKESAEKLGLAEGDDVTAIIKSTEVIIGK

SEQ ID NO: 11245 - protein, 145 aa, Methanobrevibacter gottschalkii
MVVRVIESKEDKITTADLIDELKKNSKVDYCGAIFSFEGFVRGKEENMNLQKLILTTPDKEKTKSEIEKIVENAKIKYNVAEISVVHYIGEFYTGDLLFLVAVLGYHRDESYKALKEVIETVKFDVDFKKEEISDEGTKVILAGG

SEQ ID NO: 11246 - protein, 177 aa, Methanobrevibacter gottschalkii
MNKVRGIFIGRMQPVHNGHMQIIDKILEEVDEIIIGIGSAQLSHSLKNPFTAGERVVMLNQALAERGVDPSRYYIIPMQDINFNALWVSHVKMLTPPFSIIYSGNQLVKQLFSEEGFEVRQPPLYDRLRLSGTEVRTRMIEGGNWEELVPNATINLINEINGDERIKNLSIREISEI

SEQ ID NO: 11247 - protein, 236 aa, Methanobrevibacter gottschalkii
MNKKMQYQILLIVLIAIVIFNLSIIVSSMMNTPDNVYNITNVGHNANGTVYKIEAGNMSSNETVGLILGVHPREHEIHEAVNNTIYNITSENGTNNLTKKYVIYYIKTKDNLTSREDTRPAGEELANKFIVPNIVKDKPFIVLDVHEINPDYEYSNFIFSLSNRTNTVDSYISHIANDVNLVDYQFSEGTSPEKVTKPIASKGVTTLLMETSITDALMEKQKTADNLIKSLDSLEP

SEQ ID NO: 11248 - protein, 224 aa, Methanobrevibacter gottschalkii
MENKNMIIIFAAVAVVIIAIAGILFATGFIGGNDVETTPFKMSFMEGSFIGNVSLENDKEKFMHSYEDKENKITYNISTVDNSSVLMEIYQIQGLGNPEVRSFNGNEWNIYFTQAVPNNNSSTNSSNGDDAMNIIIGESQGKKQGYLIYMIIDGKSKINATGKMYGEAYTNYFEPLLESLTLKESKNVPHIYDEFGLTKEQFDYQIDLIRQYKSGNTSALQGAQ

SEQ ID NO: 11249 - protein, 176 aa, Methanobrevibacter gottschalkii
MRITVFHANECDRKKCTSIKMEKMGKCRLVYDINKIPGGAVVLNPYAEKAVSYEDYKYVQRRGVVGLDCSWNEVSQSKKFFSLSKYHRSLPFLIATNPVNYGKPCILSTVEAIAATLYITRFKDEAYDMMDGFKWGHTFLELNQDLLEAYSEVDTSAEVVRLQNEFLENSKKEVND

SEQ ID NO: 11250 - protein, 48 aa, Methanobrevibacter gottschalkii
MARFEEAENRMFNVKICLKCNARNPAGATTCRKCGYKGLRYKAKEPRG

SEQ ID NO: 11251 - protein, 250 aa, Methanobrevibacter gottschalkii
MKDVENYIRDILKSRKIHFTLIDPDEQTPEEALEIATQAIEGGTDGIMIGGSTVNGDDVNNTCKILSENIAVPIIIFPGNTSSVSEYADAIFYMSYVNSRDPYWINGAQALAAPAVKASGMEILSMHYMVVSPGGTVGWVGDANLVPRNKPKIPAAYAMSAELFGIKFFYLEAGSGAEEPVPPKMVGYAKMAGPKNILVVGGGIRDGKAAYMAAKAGGDVIVTGTVVEEVDDVKTKIQEITGAILKASME

SEQ ID NO: 11252 - protein, 357 aa, Methanobrevibacter gottschalkii
MLNSLYEKAIAKRGFIHDIDSQTDVESQLEYKWFNRDILEIDNGFSIAAGDGSFNKKKFLTTNFCAVGAESIIYDGKIKKIDDSDIFDIPHVSFLDELLSNYMAIYELKCALRTIKEYNVDYYMIDGSILGDLQNPFPRGAKLPSKLKNNLDDILLKEFERRLNIKKYGLIFPEIRDSLNLVEFPKNENSNKIEEYNLHLASIEKIILLKEILQFRKKIISISKTSSDNDLFHWNIPDIAFLDKFTEKQGISLIKHKTVYKKTAFPYFNDFFKSITFTIFYIRLQDNKNVLKVELPYKASKEDVFELIKKINALTVQGYPYLLNKAHNDVVITDKNIKELLKIAKIYETTNREVMSW

SEQ ID NO: 11253 - protein, 495 aa, Methanobrevibacter gottschalkii
MVVGICIGETSLTEVTFISDKMPKVGEYVTIEYDGKKVLGMIENLIRGNDSLNVDINDFNAIQKISRIGAEDNYIKGRVKILGDVNDNLKLPRTPVLPGTEIHLADGEILDKIFNVKNPIKLGCLVNQSDVDVNVEANPILSRHLAILAMTGAGKSNTVAVLIDQLLGYNVPIFVFDMHGEYKDAEFPNGNVNVIMPKINPHYMNFYEIKKLVNIGANSFIQERHFRRAFKQAEKNISDGIAQTNNFLQIMYDILDKDSHVEGSDKQIVDVMNKIDDAMERYSNLFDKNIGNILSNVKRGYVNVLDLSQVDESVASVLVSHILRNALKRSKDAAHTGDKKDLIDNSVFFILEEAHILAPNKRESDSKRWIQRVAREGRKFGLGLCLVSQSPKTVDHDALSQMNNMIILRLVEPEDQRHVQSASESLSQDLINQLPSLNVGEAIVLGLMSKIPTLVKIDMFKGRRHGDDMDLISYFKELGEDSDYNDETVDMGYDY

SEQ ID NO: 11254 - protein, 413 aa, Methanobrevibacter gottschalkii
MKFAHLADTHLGYRQFGLIEREKDFYEVFEKVIDKIIEEKVDFVIHSGDLFETARPSPNALLVFQKGLLKLKGAGIPMYAIAGNHDSVMRQGAIPPQVIFKKLGLKVISPINTDYMHGDIFIAGLPYYPSSQSKTLKSKLAELSKKAANHEKSILVLHQGIDKYLGYQYELEIGDIPDNFTYYAFGHIHKYINESFGNGRLVYPGSVEIWKTDEVEDYKKNGKGFVVVDLEGPKPIVKRVKIDVPREFIKRSLDYENLESGIAGIKETIKDFDKQPILNLTIKDVESDTSGVYDIINEDLGDLSLMIRPKFNIKGEELIDEDNIKKNGLGAKEILVEQLKKYNDDNVTQLAIDLYEYLSKDKIEESKDLIEQFYNDFYNSTKDEVELQTEEIEPETAQVKSEDVQATFNEVLK

SEQ ID NO: 11255 - protein, 915 aa, Methanobrevibacter gottschalkii
MIFTKLRLRNFKSHEDTIIRFEKGISVIVGENGAGKSTILEGISFSLFKQHTAKKIDDLVRNNAQSMFVELKFISNGKKYKIVREKKSNLKSVLYKKTSLDGEYVHVCSGDKEVANEIYQILDIDSDLFLNAIYIRQGEIAELVDKTPAEKKQLIAKLLGIDSLEKSWKHLLPFINDYENQLSELKGKLYNSKELADDLTRKREELNSLKQRGYELEENIEEVSVLLKEISESKRDMEREKEIYETQVNNLENEEKTLSKLEQDKHVIQNNLDNIREAEEQISRLEKYVSKLDVYLDFEKSVLSIQNLKQKEQEIEDKIKSIAQQKQLVADNKENYNKFLASDEEINKYNNQKVNFEKELATMAKLDKDKKDLLKEVQNERNEVNQFFARAKDKLDDYGLDQDRLAKINDINSIEDATNNFFDEISGKIKSLSDDIIAKNEEIVVFKQNIKSSQKPLKDLKDVDSKCPVCQADIDDNKKSELIKQYNAEIEENTKLISEYEESVRLLTKNKASFEDKSDKLSELSKQIIEYKHKFSHLENQLVKLNKLDDELVSKDFISGKLGELILIIANKKENRESYKEFYDAYNQAKGALEVLGSEIDAQYKLKQVKNEIDNHVTNIKLAIEQDPHLSRDITAAELQDRITDLKHKNEEYNQLKGFIQNKKSYLTQLDSVKEDIGMSINQIDILKNKIKASVYDTEKYEQIIYHSDIYERRFNKFNNELSGIKGQARETITQVKDLTGKLESVKVFQKQYDDISDYINLLNHFRSLYSKNGIQKDLRNISRPLIQKYTKDFFNEFNFNYSDLTLDDEYDVTVYGPEGESSMSMVSGGEKIAIALALRLGITQAMANGELDTILLDEPTIHLDSSRRHELINLLKEMSVLPQMIIVTHEPQLENAADNLIKVEKVNGVSKVIM

SEQ ID NO: 11256 - protein, 131 aa, Methanobrevibacter gottschalkii
MFEDERDNKIYNLIITNGFDTNKEYNQFTEKLYSKTDFLWKESMSGAYSTAGEEFYQKVDRIVLLAGLYNDNKELFEDLLIVSEKYEIPIVLVRPLGVEEVPIKLEEKAATIVGWNANCIIDAIKDAAETM

SEQ ID NO: 11257 - protein, 426 aa, Methanobrevibacter gottschalkii
MKAAVIGLGVEGKKAVNSLLNHGWEVYATDLNINVDLSGLNLPNLSLDVIDETQTVSIVGDGITLDLGFTNPYDIDQCDAVAISPSMFGGEFATKLLKNSNLLSDVVDKHKDIFTIGITGTNGKTTTVHMLKEILENAGKNVLVGGNGGGGFSGYYDLILEANEGEYDILLVEVCDMTLDFCKYCFDFDMIGLTNIGNDHMNVHKTIANYKNSLVRFFEGKTVFTAFNQDFNTDFKESSDKNIPYFEYQDELKLFGKFNLLNAGLATAIARELKIPKDVIKSTLSEFNAVEGRLDVYKINNVSVYVGKTDNSDALTSILSEKDFYAIFIGTPRHNEIHRLDILDAAVRYNPEVIVLFPGLDDTLDMAVYRLNSLGYMGNIITVNSLDEIIELVAEYSHEDAILIGGNGQDTLINIQERIKLISENL

SEQ ID NO: 11258 - protein, 395 aa, Methanobrevibacter gottschalkii
MSSGWRRISITICLALIVLSILFVAFSAATNAPYTAQSVADEYNLPIGQSMFENQSILGQQDSISVPLISNVGFLQHQITALDIQGLLMTLTTGMVPFDFSTVSSEGIDSYGDVVNVEGPGFLTFEGDKLAVKSPNNYVWGYSTPYKWLVKTDTGVDVVENGTVVKSVPENEIKNLDYHNDYYNSSTIRSWYNYDAHNGSTFTLEKGMKGFSDGRNNISAADVPVIFGHDVVDYASEYPTGSPILLYSGNYTEEDGEAYGTSLGSHAEYGDSIREVNARQFVDAWNGTVIPPNSTSSGKDYVYFESAVDPTAPGGSAAHGVCPPARALRAAVTAEGFGLPVGMTWDEDAVLFGYNPAQDITVTNNHDYPVLIKMWTEGEGTGMGIYCQIVRYIPK

SEQ ID NO: 11259 - protein, 217 aa, Methanobrevibacter gottschalkii
MSISTIITAAGKNSRMRNDQISRNIELTNKLILPFKNKTVIETTIDNALSADIDECIVVLGHYANEILESIFDNYKDSVKFVINNPVDVGLSVSLYNGLSNISSDFALCITADQPTVSTETFNRMIEASQNSKNPNRTISILRRRKIGLLDSAEGLGMPFVAHRLNLMNYLENEDDNINPILRKIFNDGYTFYGIKEKNKKELLNINYYDDYLALLD

SEQ ID NO: 11260 - protein, 224 aa, Methanobrevibacter gottschalkii
MTNLEKNKKYCEVIESKIKLDAKPVAMKLIKTEDDLPEGIDLIDEKIRHCEMVRKASLGNTFYSTIDQQLCLGGAGAIGLRDMPEKLANGEKYFSLGRFQDLETAKKLTSKLSIVKDIHWGMIYAPLDEADFEADVIQIITEPVGGMKLAQSIVYKTGEKINPSFAGIQSLCGDAFADPYITNGVNFTLGCDGSRKAADIKDNEMTVGISKAKIEEVISGLESI

SEQ ID NO: 11261 - protein, 411 aa, Methanobrevibacter gottschalkii
MKLPSRSKSYMIPEYSVTGDLLSYLTCNLQYRYQNKGTLPPSKPVQRWFGEFIHGVIEEAYIQWEQNNMHFPWDWKKDIRPIEDLIDLRLQVRGLYPFDEDLFFSIHNQSDEELTIDDLNEHDHKKLASARAEKAINIWGKDLFPLIDASEHLIKGIRDMPNYDENTSRSNYYGINGVVDVSSSVKINKTLEQSNFDNYNNRIIEYLKKDENFQKRIAKFDKDDEYEILIDYKGMKRPPEKVNNPKVENKWETHEQQILTYSWLRSEQKSSKPIIAGIIFYLNELVPSKEDLILIKDELNNGLTDIGYEYDKDIELINSWQEDDKAPELSDNFKIDRSIRIINVDEYEREKALLKFDSVVSNIEESLIKEMKGCKIQDAWKGDSDERTCSACDFKTFCKNNSVKTKDFKIP

SEQ ID NO: 11262 - protein, 812 aa, Methanobrevibacter gottschalkii
MISYEEFEDMVVNILKRDISSNKEQKNAILAPCNKSLFLVAGPGSGKTTVMVLKILKYIFVDDIEPNEIIATTFTRKAADELYSRILGWGDMIKNHLLNTIHDFNNITKITRIDFNQIKIGTTDSIAEELLREYKKPGENQAIVIEGFVANSAMIKIIIEDEKYLNKNLVEYLKEVSGKEKIEEPSKLSEILIEIKNRIYYDQVDFNELYNKTQKDSGARIALDCIKKYEDKLQNRNTIDFAMLESEFLKKLKNNELETFLNETKIVLIDEYQDTNLLQEDIYFTIARSAIANNGNITVVGDDDQSLYRFRGATVDLFTTYQERINEKLGIEVEEINLRTNYRSTENIIEHCNQFAELDSEYQNARVENKPKIIAPDFDNDKMPILGMFRNNPEMLAKDLSKLINQLVNKGEAEIKVLQVLNKEYYEKVNGVIDIARLQQIKAENVKAGKEIEKITLKLDSDYGSASDIAILSYSPKETYYGNRSFLHYLRKNLKKLRQPIEVFNPRGIELQDIDIVGIFCGLMLECIDPDSTVQKSDKTIPKLATHNMRRWRIKAKDFIKLNPEPHEPITLSQFVTYWQLRRPRGHEEWPKTASLMELAYKITTWIEELQEDVEGIVYLEAITQSITQTGFFNDYHSNISFRTQKQERESILEAIWNIFIPLSTGGIQIDESLLETLPDNRINVLSIHQSKGLEFPLVIVDVGSRFKQNDIRTQKLRFPKSIKEETTLEDRIRRYSKIGQSKRGEKDKSFDDLTRLYFVAFSRAEKVLLLIGLNPAIEGYNKKNNHFNIPNVALGWSRDEKYIGFNEIYLI

SEQ ID NO: 11263 - protein, 956 aa, Methanobrevibacter gottschalkii
MSEVNNIDMFKNDVRYRENIAHIETIPAKKASFKKVDNLNENIVNYLYSKDVKLYKHQAETYEAIKNGENVIITTPTASGKTLAFNLPIMETMIEDDNATALYIYPAKALSNDQLHVLENLEKELDITINPRTYDGDTPRNEKRGIREKSRIVLTNPYQLHLILSWHHQWTRFYKNLRYIVIDESHYYKGVFGSNVSFLIKRLKRIANFYGSYPQFILSSATLANPLELANRLTGQDFVLVDNDTSPSGEKDFILYNPFQNYVRNKVYAQNAPSVHMETENIFMYLMLKNIQTLCFTVSRKTTELIAMWAKKDMTQVKGKLAHRIAAYRAGYQPQERREIEEGLKSGKYLGVTCTNALELGINIGSLDAVIISGYPGTMISTWQQSGRAGRSNQKSIAILIAFENQLDQYFMNNPKFFFDKPHENAIIDLTNPILQEAHLLCAAKELPLKRGEAEKYFDISQDVIDELVSKKDLYENHRGDFMYPYDDNPAMDHSLDQISSEEFKVMVNGRLLETMERSQVYREAHEGAILINKGDTYVVNSVNLKKGYVNVSKEVVDYHTMVLNKTETNIKKKLSKTKYGDLTIHFGELTVSEDYFKYKKMHFSKPIGTFLLDLPPLTFNTKGLWFTIPKEVKDAVEDMFPNDEEVFAGGLHGAEHALIGLFPLHTMCDRFDIGGLSTNYHEDTQEATIFIYDGYEGGIGITEKAVDVFVDLLNSTIDLLNNCKCKKGCPACIYSPKCGNDNKPLHKGATKYILEYMKKLISDEVDGQKEDIIDVQSTVDDSKEFEEAYQLYENGDYSASKDILNNILANDKKHVRSLALMAQILYDQDQKDIALLFTKKALAIDRSNEMANNLEVLLTNKSKTKENHSDLSSLDDVDTLFEEAYDMYSQGDLDASLNILEKLLDFDSKNAETLALMGLIHYHSGFFPKAVEYYRKATKINKNGEMVKELKIRVS

SEQ ID NO: 11264 - protein, 379 aa, Methanobrevibacter gottschalkii
MNFKSKFGFGCMRLPTTDENDPSSIDQDLFNKMVDIYMEKGYNYFDTSYAYHNGKSEVAIRKALVERYPRETFKICDKMPTWALTNSEDNEKFVNEMLERLGIDYFDVFFIHNINGPWLKNAKNADTFEYVKKMKENGIAREIGFSFHDKSDLLKEVLDEYGDIFDIVQLELNYLDWEDPAIEAHKCYDLCVEHGLDVYVMEPLKGGVIVNPNDEIKNDFKEFNPNKSIASFAIRFCASLEHVKMVLSGMSKMEDLLDNCDTYENFKPLNREENEFLEKMAQKLSDNLAVSCSECGYCVDACPEMIPIPEYFNLYNTSKNQPESNIYRLYFDKLGDEKVPADECTYCGTCLDYCTQKIDIPEELEKVVEHFQEGFSPYE

SEQ ID NO: 11265 - protein, 125 aa, Methanobrevibacter gottschalkii
MHELSMAQGIINAVLDTAKENNATEVNKVTIEVGRLAMINPEQLQFILGVLIENTIMEDAEINFEEVPVEMKCFDCDFHGNAVLDDSDHYAPLVKCPKCNSLKIDILNGKDIIVKNIVIEKPDDA

SEQ ID NO: 11266 - protein, 216 aa, Methanobrevibacter gottschalkii
MHQVADVEVAKNIMDANKRLADKNLKNLEDKNIFCVDFVGAIGSGKTTLVEDIIDNTDYKIGVLAGDVISKFDAGRIEKHNVPVVGLNTGKECHLDAHLVGHGLADLPLDDLDMVIIENVGNLICPVDFELGSHLRIVVVSVTEGDDTVEKHPIIFQTSDVVVINKIDLADAVGADADKMVADAQKLNPKIKIIKSSLKEGKGLDEIISTIEEAMN

SEQ ID NO: 11267 - protein, 343 aa, Methanobrevibacter gottschalkii
MKVWIDISNAPHVRFFKNVIKYLEAEGEDVIVTARQFGDIHKLMEMYDIDFISVGKHGVSLYDKLKESTSRVYNLVDVIHDENVDVALSKHSIELPRISFGLGIPSLYVLDNEHALAANKLTLPLCDRIITPKIIDMWKLMKFGADPNTIISYDGTSELMHFKDFKYNDNIFDDLNLNLTHPKTILMRPEPSLASYLDADCRKSVLSPIVDELKNVANILILPRFKEQAEIFEGIEGVSILKPPVDTSNIIKKCDLVIGAGGTMNREAAILQTPVISCYPGKTLSVDQYYINKGLMYRSQDTDEVIHKALEFIVNPHERIDVKTDDLFQIIIDNLYDLAKNGK

SEQ ID NO: 11268 - protein, 360 aa, Methanobrevibacter gottschalkii
MLLIAQNHLQLILEVGLMLFVTLVFCLNLIPLSLSIVTFLSLFIMGGLTLLFGADIALLVLFSSQAEFTHPFGPIALLGAVTALASLKVMSESGVDIRPLRRFVILFLAGITVFGGLMHRSFLILWLLGLFLGYLMISKSFREKSVFTLKRIMMFFGAAGAGFIFLEVLARVSGMTIFSPLLRLGRIEQYSLSSIKMVLNNIQLIGHNANASYWGADGTAFAEGYITLPMQLILFFGLPFPLFFGVLVNQKDTIDYMLPGIFGWGFDFGILGLIGLMIFVLGTIIIGFKVLNMYREKREKNNKKYLGREVLLTGALAAFCAQSLIGLFIFNRSINGMALLTFLFVGALILANVVSLKSRS

SEQ ID NO: 11269 - protein, 152 aa, Methanobrevibacter gottschalkii
MKALILLGCPETPAQTPMAVYVFNKLTKMGYDTTIAANPAASKLVKISDPEGLYNLNLIDLERTLGEINEGDYDLLVGFVHKDAAASFFVTFDQILNTKSIALVFSRDADEVAEFVNMIEESGSKALISAVRAFHNPSPIKVKFDKAIKEFE

SEQ ID NO: 11270 - protein, 104 aa, Methanobrevibacter gottschalkii
MSFCLDTYLQQSDDYEIHASKAGFKDCAMIIRFKADDLVYVKPGDEVLGVRVIGIPPIPIGFDHNKGTVFIPYTKPCHGTSVVELPINEEEIEKIRKLDTGNKK

SEQ ID NO: 11271 - protein, 314 aa, Methanobrevibacter gottschalkii
MKSTVVGSFPAKESSPSNFKDKILNTLGLYDPFREAIRSSVIAQLDAGVDIISDGQVRGDMVSIFTKYIPGMKIEDGNTVIVSKIRNPIKEISIKDMQYAKKVMKEYYNGNIPDGKGIKGIITGPNTIVHSSRIESFYKNKEDAIIDLAHSLKFEVDSIAKKVEPVYIQIDEPFLSTGMVDMNTAREAIDIIHDGLDIPLGMHVCGILSNAFKDLAKFNIDILDMEFAGNNINLGVLEKNASLLTNKKVGFGCIDSSVHTVDDIGDIDMLVSRAIEIVGKDNLLLDPDCGLRRSPKDVAFEKLKLMNEIKDKYA

SEQ ID NO: 11272 - protein, 143 aa, Methanobrevibacter gottschalkii
MYFGFSFIGLLFLIMLFIPNVLWNKFQPTDYEKYSKRENIILLAFERVGQVLVCIFSLFCGVNFNLSICVAIPFIILILYEFYWIKYFKSNKTMGDMYSDFLKIPLPGATLPVLAFVFLGICSDNILLIFSTIIWELVILVFI

SEQ ID NO: 11273 - protein, 243 aa, Methanobrevibacter gottschalkii
MKFLVINGSPRKQNTYNVIKQAKVNLNGDFEEINLIKENIPMCNGCFKCILESETECPHYDKIDPIIEKLHECDGLIIGSPVYAMNVTGLLKNFFDHTAYLYHRPEFFTKKALVVVTTAGAGHKKVAKYIDETLRHWGVNKVYKISFACGGNDSLDNDKVNKVSQKFAFDLISNKLHSPKFTDIIFYNVWRAMALSKDPIKADKEYWFNTGLVNHDFSPEVKLNIPKIVFAKIVFNVLKKAIK

SEQ ID NO: 11274 - protein, 342 aa, Methanobrevibacter gottschalkii
MVLRENRIFYLDELRAIAILCVIFAHTIQNFPTNMDYLTSPTLLSYLTVARMGVILFFMISGALLIGREYNLSDFLKRRFARVLIPTIFWQIIGYLSVLIFIGFTYDNLVQASVQVGFPWFVCAILGIYFVIPIFNSFIKEYGIKGAEYFLIIWVFLVILTNMQLNETYYIDFIFNNVGIYIGYAVLGYYLANKEFNIYSFPMVVICSVLFIISLALNSYYAFNFSHVFYIESYSIIVQCALLFLILRYMSKLAKFRPKFVLSKLHSFVQNSFIGSFIYYLSIFSFTIYLMHGFIVNAIIKYMPVTQFSMIPAIFLLIAVISIVIAAVLSKMPIISKLCGIY

SEQ ID NO: 11275 - protein, 250 aa, Methanobrevibacter gottschalkii
MKGKVIFIGAGPGDPELITVKGRNVIEKADVIIYAGSLVNPDVLSPAREDCEIHNSAYLNLDETDAIITKAVDEGKLVARVHTGDPSIYGAIAEQIRELKKHDIEYEIIPGVSSLFGTASVLEAELTLPEISQSVIITRPEGRTPKPDGESLASFSKHHATMCIFLGIGMIDKVVDELLVGYEKTTPIAVVKKATWPDQQIIKGTLEDIAQKVKDANITKTAMIIVGDVLDPGDFNASKLYDKNFKHEYR

SEQ ID NO: 11276 - protein, 131 aa, Methanobrevibacter gottschalkii
MNDRGFVSVEYIFTLFILFTIGCGLLFYSSSLINSSINIEDSVSHRIILNDVSCVISQVNSNGVGYSKYIKLPSDKGYFEITVDKSKLTIEYDNKKGETMLPLLNMDSKYKLISGRGYYISKSDDGKIVIT

SEQ ID NO: 11277 - protein, 165 aa, Methanobrevibacter gottschalkii
MTGDNGQISAELLFLFGTLIIVLMISIVFISDENELNIAMAAAHSGVIEGLATSSSGIYPADAYSDYSNSKMNVLEPYSVEIVNISYTELGGDNNYDKKQIQFKVYAKTSDRFNNKELTSIGDRINYNLRKSIAVSFNSINATNKLYNPVFSPHYVYTTANVKWV

SEQ ID NO: 11278 - protein, 131 aa, Methanobrevibacter gottschalkii
MGINTYIDFMYSEDEKKQLMEDLKEMETFKVDTGDEGKILQNDLEEYFINGNGDREDLTFRIELYFYAFKIFCRKPVVIDRNQFTIFFNDSLLDWNLIKLIMDDLSDFELEIEAVKEERDVLINLNFTLHY

SEQ ID NO: 11279 - protein, 253 aa, Methanobrevibacter gottschalkii
MIDTHCHIDFEDFDDDRDEVIKRAKDKLDNVIVSGYSNDSNMDVLKLSKDYEGFIYPTFGFHPVSSQNATDDEIKTAHENIVEHLDDIVAIGEVGMDYFYVTDNSLRKRQQKIFTGFLELANEYKKPIVMHVRDCEKKAVNIIYEYEDIPYFVFHCYGGSLKTAKRIMNMDNAYMSFSTMLCYSKQHQDLIEKIDLDYILTETDSPYLAMTKEERNEPANVVNAVYKIAEIKNMDIGTVDEITTSNACNIFKI

SEQ ID NO: 11280 - protein, 254 aa, Methanobrevibacter gottschalkii
MAENILYRLYEWYISRNLVPEKMPKHVAFIMDGNRRYSKLQGNIDVVKGHEMGVNILEKVMDWSIELGIEIITAYAFSTENFNRSKHEIDGLMNLFVINFKRLVDNPKIHKYEVKVKVVGRTELLPDNVKEAIKEAEDATAQYNKRFLNLAIGYDGRLEIIDSFKKIIKDVQDGKISIDDVDEELVSKNLYTAGLDDPNLIIRTSGEERLSGFLLWQSSYSELYFCETLWPELRKVDFIRAIRSYQARERRFGA

SEQ ID NO: 11281 - protein, 238 aa, Methanobrevibacter gottschalkii
MKTIAIGVGKNENIIQACHIFKEKHPKTDLKLIYRDEDLVRAVLDNKIHGVVRGSLPASNIMRELKEIYPEITRATYVNGDEYEFLLTPVGIDEGNSVEDKLNIVKNCIAFYKRLGKTPKIAVLAEGRKDDFGRGEEVSKSITDSEKLTKLIQETTGEEVKNYYILVEKAIKDDCNIIVAPNGRVGNIIFRTLVLLNSWPSYGAITFGMDKIYIDTSRDQSIEGYVRSLILANTLDNF

SEQ ID NO: 11282 - protein, 459 aa, Methanobrevibacter gottschalkii
MKAINKMLCLVDGEHYLPVTQQAIDTLNNLEHIDVAGAVFIGGTEKLRDDSEETYSQKLGVPVQFAEDKDIPYDIIVSMIRQYNIDTVMDLSDEPILDYPKRFKIACSVLNEGISYEGPDFKFEPVSQYDIMKKPSITILGTGKRIGKTAVSGFVSRLIDKNNYEPCVIAMGRGGPSEPEIVHGEELEITSKFLLEQSEKGIHAASDHWEDALMSRILTIGCRRCGGGMAGEVFLTNMKKGAKLANEVDSKLAIFEGSGAAIPPIKTDKKITLVGANQPIETVTGYFGPYRISLGDLIILTMCEEPMASKDKIAKIEEFIQEINPDAPIISTVFRPKPLEDISGKNVLFATTAPEGVKDKLVQYLEKNYKCKIIGTTSHLSNRPLLREDMKKYMDNADVMLSELKAAAVDVATKDAINAGLDVVYCDNIPIPINDTYPDLSKTIINLVNSAIDNFDNQI

SEQ ID NO: 11283 - protein, 238 aa, Methanobrevibacter gottschalkii
MDISEINLDETHIRLTTDLSCHDLKRYIFSIRRDLKNYIFKNQEFALSLEPIKSEDNLPLIVKTMIDASNIADVGPMACVAGAISQLSLNYLIEQDSKYSIVENGGDIALINDSSLLCGIYSNNQVLGNDIAFKIKPRKKPLGICTSSGKIGHSISFGKSDSVTVISKSSAISDGIATRVANEVNGSNSEEKVSKGLECGEDYSEFFDGLLIISENNVGTVGRLPKIIETKEFDVKIV

SEQ ID NO: 11284 - protein, 95 aa, Methanobrevibacter gottschalkii
MYKDEMIQLHQFLVYVLKYLAEDDQITNDCSEYISLKISPHHIHKTKAEHKHAIFVLCKIIAQVVADKENNSIPDNVRNSLGDLVTRSQVELSAK

SEQ ID NO: 11285 - protein, 256 aa, Methanobrevibacter gottschalkii
MKSFEFLSIKREKKPRTSGLTMVLDKGLGLETASSLMDISGEYVDYLKFGWGTSIVHEQDIIKSKVEMYKSHNITPYTGGTLFELAYTKDKLEEFFDEAHNLGFPAIEVSDGSTDIPHENKLECIEKAKESGFEVLSEIGKKNPILDKELSIDERISNMADELNAGSSLIIVEAREGGKNIGIFDSKGNAKEDEIDTILNSIKGEKILWEAPNKNQQVFFILKLGNTVNLGNISSDEITSLETLRRGLRGDTFGKL

SEQ ID NO: 11286 - protein, 417 aa, Methanobrevibacter gottschalkii
MKNNRTIGEINEKITNGEANIYTAEEFKKLIKNDETPSFNEVDVVTCGTCGVMSGTAAILNFVVSEPGKFIRANEVYLNGVPAYAGPCPNEWLGSVDVIIHGTAHSIHNENYGGGFLFKDILEGKEIDVRVESADGKTINNTITKEDIIRAQIIGTRMAFKNYTAFTNPNKEDISSIFAAKPLGGNLSGLTFSGCGDLNPLQNDVPQNVIKEGTKILINGTQGYVLGNGTRSSAEKPNLMLTADLMQMDSYYIGGFKTGQGGEVYDTVAIPIPVLNEEIYNNLLITDDKISITVSDIKGRHLPLTETNYAKLWGEYSLRPQYDRANCYKCDSCTVEEVCPTNAFANERLDLTHCFGCGMCANYCRHDAFDMNMGSVDLTIDNEDVNIPIICRQSDRLRGNKLSLKLKKLIQNQEFKL

SEQ ID NO: 11287 - protein, 202 aa, Methanobrevibacter gottschalkii
MQKITDSPIDFAEEIIEDVKNSKEEGVLKCVQCGMCTSTCPAALHSDYNPRDIIERVLDGDVSIIEDDCIWNCFYCYTCHSVCPVGNSVCEVNQILKQFAIKNEIGHDKLYEYMGFADSYFTAAIGAIPEIFFKDIDRDVPGWWDFRLHLDEIRKELDLNPPLMPSKEVIDEVSKILTITGFKDKIETIRSTQEDKNESNSR

SEQ ID NO: 11288 - protein, 313 aa, Methanobrevibacter gottschalkii
MKVIPDSDILLFRSCLVSVEYPGIESSTKFVFDKLGIDYAISENQTCCTGLGHYSDVFDQIDTTAIGARNFKIAGNLGRKNLVMMCATCYAINKKSVKLLNKKDDLRNHINKLFDDNDLSHLKYEKDDLNPTENIFHVVDILYGKKDEIKDNIKYDLSDYAIATHHGCHYCKVHYEDTIGGVRDPNILDELIEACGCNTIGWYDYKRATCGTGFRQRYSNPDLSFTATADKMNSIDDENVDILVHLCPNCHIQFDRYQHLIGEREGRKFRAIHLNIAQFIALAMGGDFDKVIGVKAHTVPIDSVIKELKEVNK

SEQ ID NO: 11289 - protein, 769 aa, Methanobrevibacter gottschalkii
MRDNLKIGVFLCECGGNIADTIDLDEVRDALDVEFIGQFENLCSLNGRKIIRDAIFDHDLDRVVVAACSPISHEKTFQDYIKPLNPYLMDMANIREQCSWVHSDNEKATHKAITLINASIEKVKQSDAVDPIYCQTPDEVAVIGGGIAGMNATLSLAKQGTKVTLIEQSPSIGGHMAKIGKVFSPVKIAEECGMCLLNPILNELVWNENIEVLTNTKVIEAERRAGTYNLILERSPRYVDTEKCIACGNCAEVCEVEVPNDWNDNLSLRKAIYRPFGQSYPEAYVIDMENCSKCGDCFRECTMKAIRLKGKPERIPLQVGSVIVATGHKLFDMEKRPEYGYTRYDDVITQSELGRITGVNGPTKGKLLKSNGEVPKRVVMIQCVGSRDEKPEGHRYCSKICCTIALKNANIIKHKYPDTDVLICYTDVRTPGMFEKYYKHTQENEVRFIRGRPGEVVKKGDNFIVRTEDTIKGEFVEIEADMVVLSTAMEPSEGTIEIAEILNVGTTEDGFIKESHPKIKPVATDVQGIFVCGTAQDPKDITDSIMQATAAASKVNEYNYGGVEIEPFIAEIDTEKCIVCGDCIERCKYKSMSIQNDEIYIDPMSCTGCGKCLVGCNQRAITVNGNIDEKIMSTIKGVLSKKQEGQRTILVFLDNIGYTAADNIGVNRLSYPESIHIIKVISVNRVRPRHIQYALENGADGVFIGEFPGDLMYDEVERKIQRVKDRIYEMGENPERVTFSKVYIPYFSGLARKFVDFDKKIEELDEAEL

SEQ ID NO: 11290 - protein, 189 aa, Methanobrevibacter gottschalkii
MYYLKLSIGDNMARREAIENIINCIDDELVVCNIGFPSRELYDIKDRKENFYMIGSMGLASSIGLGLALAQPNRNIVVIDGDGALLMNMGSLVTIFANNPKNLTWIVIDNGAYGSTGNQDTYAQKLDLVDVARGVGFKNSYDFEDINLKEFIKSDDASFIVYHTEPGNSKAPIIDLSPVEIKNRFMDIV

SEQ ID NO: 11291 - protein, 163 aa, Methanobrevibacter gottschalkii
MDSSEAIFDGLKDAGINFIVSVPCVNLSKLLNMIDKDPDIIHIPVTREEEGIGICAGAYLGGKKAAILMQNSGLGNSINALKSLTELYEFPLLMVMSHRGTEGENICGQVPMGESTPLILEAMNYKFFKPGTPEGAYEDVKEAWELSVEEGKPVSVLLEIKYW

SEQ ID NO: 11292 - protein, 372 aa, Methanobrevibacter gottschalkii
MFDRLPISSKTEKILTKSLDEQITVGEANYLMNIKGADLYPLLATADYLRQKIVGDNVTFINNCNINFTNICTVRCGFCAFGKDADNPDAYILDDEAILKKAQSAIKKGAHEFCVMGGVLPDADIEYYEHLMHLLKDEYPNVMIHGFSPTMIADACKVSGISIAEGCERLKDAGLDTLPGTAAEILTDRSRALICPEKVSVDEWINIIKTAHEVGIPGSATIMYGHVETLEERVEHIDIIRRIQEETHGFTEFIPMTFMHEYSPIFLEGQSNLGASGTQDLKLYAVSRLMLRDLIPNIQVSWVKMGYRFAQVALTAGTNDLGGTLGGDELSEASGAPDGVEASIDTLSRMVKDLGRNPIERNSKYSEFYPIE

SEQ ID NO: 11293 - protein, 194 aa, Methanobrevibacter gottschalkii
MKKFIVIDGLDGSGKDTQVKLIAEMYEKQGRNVVIRSHPCFDNRYGRKSKEALLKTGKINHLLATVYFGLDAIRSVVKYTHDDNVDVLIFSRYILAVMYLPNGINTIVYKIVAFILPTSDCMFFLDVSPEESLRRIGSRNENTEMFENIECLRKNRLKSQKFTYNWNVIPGDDSAEVISEKIKMKCIETDKLLN

SEQ ID NO: 11294 - protein, 85 aa, Methanobrevibacter gottschalkii
MDKVLRDILRNNQYFEEINPDRYVPEFLGLIVNGVVVYHVNWIDIIENEIVFMHKDIQTHPIVSLVLENLNSLMIITNEGIKEVL

SEQ ID NO: 11295 - protein, 325 aa, Methanobrevibacter gottschalkii
MFSKATLKERRQYYREEWSVKDLPEFIATDLKKREFGFDHNGRGPNDRYKVFRGPESLGKFLKFKSPFAAYISVAFYNNPRRREDWLKAEYIFDVDAKDIPIRTCQCNGVCEVCLGEALEIVNSLIDTLQSDLGLKNIHLIYSGRGYHIRILDEEMMSANSELRSEVLKYAAGAEVPKSQFINPEISNKSFNFEHFTIPVGYSKIFTDKVKFNIQHLVGNEKIDGINPKLMKDILSSRHHLDNDNWGYFKRDIGPRRYKNLVAAMARVNLSTIDAKVSIDLKRILRLPSSLHSKVSMKCMEVKNRENFDPLDKAVPKFVYERKGV

SEQ ID NO: 11296 - protein, 171 aa, Methanobrevibacter gottschalkii
MEEVVKVIGIEHLKVILSSLTPEDIVKPAYENWQTGMKTGYTRLNLETGEIYGIGVELNNLPLPNNIFIDLFKIDSYDDPIDEEEFFSSSEYNEFLEFSSSEPSEYIPDIITEFCELKGIDEMKRKIGLLAYNFEKNERSNYNMWESSILNKYYDAIYEDHNPFMFSQNSL

SEQ ID NO: 11297 - protein, 441 aa, Methanobrevibacter gottschalkii
MTEVSYINPLSNEGRGIIRNYGDLNQIFKEDDSLIEICTHTANQKLSDDYIPKSYHDLALKRIQWAIEKKNNKNFTQAEFEFLTNDELYLQDVVTFHILCQAIAVQFNTGSRETRLFVQSQGTLILERLAKIPPMSRAEIIDDVLDEVKIDGSIKWKSLKDIVASKRLKLTDLLIDRGDIVLQQDDFLNRFADRFHDRSPDRMYSILIGDSVKEQILSRLVMQKTEEYIKRIKEMSSRIEIHPAIIKIGEELKEFIPDETGKYNQYYAGNGGIYGSVQAGKLNPDAFPPCIQETVNGVSSGGRNDAIVLLLTSFASYARLYPRIFASEENVKVSDMDPDLTITENEILPLIFDAADNCTPPLFEDQPQEKINIISKLGFGMHDRLDINHEGETKWYTPMSCEKIKIHLPNLCHPDKSCKGINNPLSCYGRKKFQLDNAQKE

SEQ ID NO: 11298 - protein, 267 aa, Methanobrevibacter gottschalkii
MFNEHVIKIKEVFRIPKVLISGRGGCGKSTIVSLLARKLKNNGNRILVVDCDESNFGLNKILGIEKPKKTLMNNLGGKLAVRDKLLEIVQKDENHLNIFDVMSLDDLSNDYVTWDDNLGFLEIGKIEHSMEGCACPMGALSRDFLNHLTINENEWILVDTEAGIEHFGRGVLEGADFIIAIVDPSEDAILLANKAYKLSFENNKNFGVILNKIDDNLEEILKSKLDSNIAILGIINYSSDIAMLNLQGNSVESVSIGVLDDIITCIN

SEQ ID NO: 11299 - protein, 209 aa, Methanobrevibacter gottschalkii
MKLKNFKRENMIPLPVTLISTANKEGIRNIAPYSCVVTILRPTNLVCIASAMMRDTYVNIEETGEFVINMISADMVDAVIPTSSHVSFEVDEYELAGLEATESKKVSAPGIKGAYSQMECKLTKIYKDKDPIGIPYLLIIGEVVHLEVDDDCLDEEYGVLDLNKVKPLMMLESDKGMHFCTIEDLNKFETFGAMFSDGKDPLEWMYEGD

SEQ ID NO: 11300 - protein, 181 aa, Methanobrevibacter gottschalkii
MKIESITDFENLDSPRVQRIPGFYGEKLIDGVVIRKLPMFSDERGFLCEFIRLNDEELKASNIKQMIASYSYPGMIKGWHLHSKQEDHLFCVKGMVKVVLYDFRKDSQTYGMINEIFMGDKSPIIVYIPPGIFHGTKNIGIDMSIVIGMPSLFYDIDDVDERRVNPIDNDIIPYEWDCKME

SEQ ID NO: 11301 - protein, 908 aa, Methanobrevibacter gottschalkii
MNKKLLIISVLVIFIFINAVSAENSTDINLELNHNNDECIKEISDESSTDIDLKINYEYGDEINPEISISHCNNNMNYTKNIIHSNNYRITMNKLNDGAECSVSVSALGYITQIQNITINSQSNKTTIFNLKATDIYKMGYDMTKSADRLLNFSSADDVLVITTAGMTRINDITTENALDGIYNAADGHITYGKGNLLTLHAIRTDPTNFAFFIKKGNRLTMAFYQNASTTPVYTGIGGVGLTTNQWKKLKGLIGADDAYTYVSIANAWNAGLYSDILTLASYHGHVCTGLISGQAMVTTLIKYYPPRGETGAQPLENTAYYVLGVPGGSDDDAFTWTLDITQGKMSYIGFDTMENKNMNGFIRWNSSSNTGLLIIMSYDEAKIKNTFKSLYPNINPDNSVTEDLIYQNWLISTLMSNPESLVTIEAAYKDLTLEQKNQLIGNQLWSASNITARGLDLDYINSLNLPDAEMETGIFNNVHLSDSQLKQIGVDASLKAVDYFKNINVTIEKDMSNFYVLTGAGFVRINDTATSMVFDGIEDIFGARLSRGNLLPVHTALWKDLIIEFYWLNTSDIYNSVTYSLKYNSTTGQLYECSQQYNIQDRSLRYDPPYDALMGWLFHNHVCTGSSPGVLLADKIFDDLPLGENESYVLVSTYTYCKDDMLSRLLGVSPGMGNYYNLAYSNSDVNAGALWTADSDIIIRWNSETNTGTATIIKFGYPIFKDGADEYAEWMRFVKGDYSSENIVSLPTLSFEVTKPITRDDYNKIISGKSDDEGINVLSYIRALPDKIPAVLIDNNGISNGNDGNSINKYPKKSNNNSANTNSIFSSSNNYNSPSKGLNPNVGVSSYSLSGDSDVEDKGEASSNGKSYEVSKTPATKSIDSNSLIYALVGVLAIGILIGLGFMKRRK

SEQ ID NO: 11302 - protein, 662 aa, Methanobrevibacter gottschalkii
MSKIFISCALPYANGPCHLGHIRSTYLPADIYARYNRMAGNDVLMVCATDEHGTPIAVKADKENKKPIEISKRYHDMIVRDVESMNISLDNFSRTTDEKHYEIAQNFFKELYEKGLIYRQDLEQLYCPNCKKFLPDRYVEGLCPVCGAEARGDHCEKCGRALDPTELDEPHCITCGTTPVIKDTYQYAFKLSEFEDELKEYIDNNENLPSNVKNYASNWLKEGLKDWILTRDMDWGIPVPLDEAKGKVLYVWIEAFLGYISSASQWSAQSGKKWEEYWNDFVVHFIGKDIIYHHSIFWPGLLKAAGCKLPDMIYAGEFLSLEGEKMSTSKNWVIWIDDFVKEYDPDILRYFLTINAPLNKDSDFSWDDFQKRNNDELADVIGNFLHRTFTFTRKFFDNKIPEYANPSREDEEFRKSIESLPKVAGEFIANFEFREGLLEIFKVAKKGNKYFNDQEPWKAVKEDMQKAANCLYLSNQLAKTLAYTLKPYLPTKADAIAKILNIDELSNWADAAVFLPSGYEINKAKPLFKKIEDEEIEAQKEKLQKNLKNNEDENMSDLITIDQFDEVIIKIGQIKEAEKIEKSDKLLKLQVEIGEDKPRQIVAGLAKFYSPEELISRKVCVVANLQSAKLFGTLSEGMILATGESGALLTPDVKAEVGERIQ

SEQ ID NO: 11303 - protein, 525 aa, Methanobrevibacter gottschalkii
MPESVLVNKAENYLKAIANDAISLDNIEDFEYFKDLYFKLDDRLNFLQELKEDMDAQGYTTPFTSLNKYGSKAVADIDVEEMGENSRHNKIFRMKANAKKNILDRVKSAIDSHKIAIGNLEQFGYVKCDSCYKKYSMSEYKQIEGKCSCGCTIFSFKIRKDATHRIEIIPYLPLSGNYMVLRNQLNTFGRESLKQVLNILKQERRGVVKTIALVIRFRDKNNRLVRKNITLDSEYINNYEEEVRRIYGKRVRIEALRFHRTKPAIIDDKHARTALAIGYVRYSEQIIDDIKDEILKRKLSDFKRINTYDEIFAEYENKTPNFIDKYDLEAIDKWRKSQIKENFKHLGFYDKYGNINRSLSRDLKKRENIYKNILRNIASALIIWDIFRYYITTSNNSRKIDISPFPYIRVELDREQRKVFQTTHKKVIETLNTYTNIKIIPVCEMDLLLHDKFKFEKQIKNSNIKFNHVALGAALIHENSDIELEDISNALNINESKIKKEIKNIENIKNPKSDKSKKFLDLIKK

SEQ ID NO: 11304 - protein, 154 aa, Methanobrevibacter gottschalkii
MDEDVKTVHITKALSSAVIVNLIENYPNLEVITCSPSVYDRTSSKYIDALSQLDIEVKKKYNWGAKSQTNGAEFEVLELSDNGLKPKEIAQKLDLKLNRVYYLLKKSNAKYDNRKRKHDHEEIKELKNEGLSAKEISQKLNIPLRSVYYILNKK

SEQ ID NO: 11305 - protein, 337 aa, Methanobrevibacter gottschalkii
MMILPQIPLYGIAIICGLLSFFVSRLTMPRIIRKLEAADIVGKDIHKSWKPVVAEMGGFGILFGFIIGIFSGIYMHDILTFNLVVVLVVILLVGIIGIVDDLLALSSKEKFFLLFLAGLPLIWVAPPNVGLLYLITIPIALSVGSNLTNMLAGLNGIESGLGIISMASLTIACIILGKYDVTIISMSMLGALIAFLYYNRYPAKIFPGDTGTLIIGAAIVCIAFIGRVKLIAFIVLMPNIIDAALKFYSAGFMNRQQQKPTQLNDEGKLVRPDVGFKSLIRLILRKPIAEKDAVRLIWAIGFVFGILGIAVALTMPGVLESKTLMNFLQIKEMLYHI

SEQ ID NO: 11306 - protein, 222 aa, Methanobrevibacter gottschalkii
MMPYVILSAAMTLDGKIATKTGSSNISGKKDLLRVHELRKECDAIMVGIGTVIADDPRLTVHKVDAKPDDNPVRVVVDSKFRTPADARITNSDAETIIACAREYKDELIASDKYETFKKRGVKFFYSGSKRVDLKSLMSYLHEEGIDKLMLEGGSTLNFSMIKAGLIDEIRICVAPMIVGGCDSKTFFDGEGFDLMGEAVKLELTDSYQLDKDLILTYKVLK

SEQ ID NO: 11307 - protein, 154 aa, Methanobrevibacter gottschalkii
MKASELLEAIKENIRYYPIEYLKNKVADDRYKDPLTKKLAEYNSNAYDDIYETVIIDDFDINDKVVKKIREDIAFYFDKYGGGEDEHKIFAENISLYLALIAKKPLHPYGENKKDEVYYSNGSYYCRGRIKYIHDEKSLCRYCVCKNVGFMDLF

SEQ ID NO: 11308 - protein, 221 aa, Methanobrevibacter gottschalkii
MNKRIDLHMHSLFSDGELLPSELARRALKLNHEAIAITDHVDWSNVEAIPTIQDAIDDINANWDITVVLGAEVTHAPVESIDGIAERAKELGAEIVVVHGETLNEPVTPGTNRAAVESKHVDILGHPGLITKKEAEIALKNDIYLEISARKGHCLGNGHVANIACEVGNKLLVDTDTHAPDDIITFEKSYEIALGAGLNHDDAMKAIVDNPRRLLKSKGIL

SEQ ID NO: 11309 - protein, 407 aa, Methanobrevibacter gottschalkii
MKAKAFKIADGVYWVGVIHWNSRTFHGYGIPGTTYNAYLVFGEEKNVLIDNVYRGLFDQFDARVKDAFEQEGKEFKIDVFVQNHSEMDHSTFLRDTIAKYNPDAEIYASQNCINFLEAQYHNFSDLELNAVNTGDELDIGGRTLKFISAPMLHWPDSMFTFLAEDGILFSNDAFGQHLCHSKRFDRDYPLEYVLGEAQKYYANLVTLGSPMFRMKLQELTDNGILDEIKMIAPCHGQIWTNPAPIVEKYSEWASGVCKDKITVIYDTMHHSTEKLAFQIAEGIMSEGVEVKMYFMQEDGPDDVITDILDSKAIAIGAPTMMNKPFPRIGNMMYWLDCVNFKGTGSEKNALIFSSKGWGGGAVDKLQKDLESAGFNVTDTMDILFVPDEDMLAEAFEKGAELARSIKE

SEQ ID NO: 11310 - protein, 168 aa, Methanobrevibacter gottschalkii
MSDLIIYFSRDGENYFSGEIKSIEKGNTEVIAEYIQEFTGADIFKVIPKKDYPSDYMKCIDIAKKELKANARPEIKEELSDISDYDIIYIGFPNWWGTLPMPMWTQLEKLDFTGKVIKPFVTHEGSRFGKSGKDLKRLCKDAIIKKGLSISGSDVYDLADIVKIWLEE

SEQ ID NO: 11311 - protein, 1348 aa, Methanobrevibacter gottschalkii
MKIKSIYKILIFSIVLLISLSAVAAEESMDNTTSNDDVLTSDSHDDVLTLNSNDDILTSSEKTWYVGKNTTVGGSGTQEDPFNNIELALNHSSSNDTIYINPGVYDGPHNTNLKIDIDNLTIKAKPNSVLLNANINNTRVFEVTGNDVSISGLNFSNVYMEYGGVIKWDGNGGSLTDSTIKNSKSRVGSIRWEGNNAIINNITILNSTSENGILVISGTSSNITNSTIRDTKGYYGAVMFGGKFNIIDNCTFINNTAWMNGGGVYDWGANNTVSNSLFIANNGTRGGAILTYENQPNRMNIINNTFINNIGGQAGAIVVRRAGANIDNCTFINNSAGSAGAVLILSEANITNSIFENNSASTVGGAVYITGDGSTIDNSIFINNTANNDGGAIYWSGENGTVTNTIFINNTVNNGTGEAIGYINNVTLNNVTLVNNNIEQVIVNESTPTFEYVFKLTEGYSNVKLTDNYTAFCTEKTKWSSSPRTPLIPHNDLSILKNHITGESVAEYLKILIYKYLKDPDRIRNLQQKIWIFTDDNYIDSTDSIIKEVISDYNSGFRIPNQGFSEIINDTTVLRIDFKSYNITKQIQNMIGFKSSIENITYNMSVVKNTLTPAVILGNQTTFEIKVTNTGSYYLTNVSVIEDGYDGLIYNSFSDPSGKWIFSRNSDGKPMWTYNGTLYVGISYSFNVTFNTTKTGNFTNFVVVTSNETDNKTTNNTTKVYKPDMTVEKLSLNRTVYVGNQTVFTIVVRNTGDCDLGDVFVVEKAPEGLVYNSFKGTDWSYNNGKFTYGKVLKVNESVSFEIVFDAVSPGNWTNVVVAGSNETDNKTGNNTTKVYKPDMTVEKLSLNRTVYVGNQTVFTIVVRNTGDCDLGEVFVVEKAPEGLVYNSFKGTDWSYDGNKFMYGKTLKVGESASFDIVFDTISPGNWTNVVVAGSNVTDNKTGNNTTKVYKPDMTVEKLSLNRTVYVGNQTVFTIVVRNTGDCDLGEVFIVEKAPEGLVYNSFKGTDWSYDGNKFTYAKVLKVNESVSFEIVFDAVSPGNWTNVVVAGSNETDNKTGNNTTKVYKPDMTVEKLSLNRTVYVGNQTVFTIVVRNTGDCDLGEVFIVEKAPEGLVYNSFKGTDWSYDGNKFTYAKVLKVNESVSFEIVFDAVSPGNWTNVVVAGSNLTGNKTGNNTTKVYNPGLKVEKITLDPVVSVGEITSFEIVVRNTGDCKLGDVFVHEDSYEGLRFHSFRGDMWKQKGDTFYYQGVLNPGESVSFVILFTTLKPGNFTNIVTAGSNVTNNTTTENKTKVIENHTNNNTNGTNKTVNNETKEVNVHKVDTSRATGNPLLALLMVLLMISVTSVRKFKK

SEQ ID NO: 11312 - protein, 262 aa, Methanobrevibacter gottschalkii
MDNRKVIIIALIAVIVVLGGLIAYSLFTQNQVQYQTIAVSNATTMEVPVSKNSTFFNDALGIKYYQDDKSGVQVISWNGQEQASAKGAVNIASQFEKQKAGTTQSIENGVPVYENKKLRCFIIEVKNATTNDNIIIVAKDKNVALHMLKSIKFGVSNITNAAQVEPYAESGGNHLNDNNDTVFVFYPWYVYDEGDYDAYDDYSSRDSEYADDSYYDYSSSDSEYADDSYYDYSSSDSEYADDSYDEEYDESDEDYESSEDFN

SEQ ID NO: 11313 - protein, 104 aa, Methanobrevibacter gottschalkii
MDELKSEIIKFQKERDWKKFHTPENLAKSISIEAAELLEHFQWGKDYSINEVADELADVLNYCILMADALDLDIKEIVLNKMKKNAVKYPVDKARGNAAKYTEL

SEQ ID NO: 11314 - protein, 622 aa, Methanobrevibacter gottschalkii
MIVYEATKAEFIDSVFSGSITDEIYEIYQQKIGKSGKSQIMSWENSMQYMYRVLEDPEIPDDSGVAIEFTIPTTSKRIDFILTGLNQFHEDSVVIIELKQWMEAQKVEGKDGVVKTILGGGLRETTHPSYQVWSYASLIKNFNQTVDEDEIGLYPCAYLHNYDFTDADDLSDEIYKPYYDKAPLYGKRDALKLRNFIKKYIRHGDNSDILYRIDNGKIRPSRKLQDSLSSMLEGNKEFVMIDEQKIAYEMAIKMARESYLDDKKRVLIIEGGPGTGKSVVAINLLVDIIADDMLSLYVTKNSAPRNVFFEKLRGDKYSLSYLKNLFKGSGSFTKSKSNEFDAIIVDEAHRLNEKSGLFGNLGENQVKEIMNASKFSAFFIDKHQKISLKDYGSVEAIRKFAQEFDAEVEQIKLTSQFRCNGSDGYLSWLNNVLEIEETANFDGFDFDYDFRVVDSPNELKNLIFEKNKENNNARLLAGYCWNWIKEGKNNSDVHDIEIDDFSMSWNLGNSDTWAIDDNSVNEVGCIHTSQGLEFDYVGVIIGNDMRFDGEHIITDFNQRAKTDKSLFGIKKKHKENPDEALKVADEIIKNTYRTLMTRGMKGCYIYCEDMLLQAYFKERFGN

SEQ ID NO: 11315 - protein, 402 aa, Methanobrevibacter gottschalkii
MIKRKLYLNQIERLMDKEPIKIITGVRRSGKTYLLKSIQEELKNRGINEENIFIISFESMKYNKIENFRELDECIINLTRNTKGKIYLLFDEIQNVKNWEKSINACRVDLDCDIYITGSNSELLSGEMATLISGRYYQINIYPFSFSEFIQYKKEIEKTDIDDLEELFKEYVEYGGMPPIQQVATEDKYSYLGDIYNTILLKDIIARHNIRNTDMLNRILDYVIMNLGKNFSATNIVKYMKYERRKISKDTILDYILYSKNACFIHQAPREDIKGKKVLKHNEKYFLVDHGFYQAKYGEIENMGSILENIVYIELLRRGYDVKVGIINKKEIDFVCTKDKKRIYIQVTYKLENDETIEREFSGLVKINDNFDKYVLSMDKLDFSGSGLKHRNIIDFLTSDYI

SEQ ID NO: 11316 - protein, 981 aa, Methanobrevibacter gottschalkii
MEFNENQKRVIAHEKGPLLVEAGPGSGKTTVIVERIKYLLNNLNIAPESILVITFTRKATENLRNRLNDYISKDDLSKMHISTIHSFCLEYLKSKEGFLKLLDDDNSEKKELFIQKHKRALGFVGSATLFDYQIPAIIDKFGEYTSFNVNTDKLINYIKETKPISKDYLDFIESEIYFSKKRIEDNDFKDDWYNARYLQTPKAYLKYLEVLDNNSYVDYDTLQLKTLKHLTRDPKTQFNAVLIDEFQDTDPLQIRIFEILLKQSDYFTAVGDVDQHIYAFRSSFRDYFKDMKERFDAEIISLDVNYRSTANIVRVTDSFIKHQRSDYTQKHLVSNNDNYDNDTFLIESEDSQDEASKIFNIIAELKRLNKIEDYGEVAVLYRKHNTRTIANLIELLDENNIEFVIRGQNDLADQNEIRSILLLLWYLTRNMDEGHVLSGDELDELNLKAFCGEYFEPTFWSLEDETKTYLTTLQDLFYENILKVENEIRSLQGKRPVKSYKRVRVNESYENLIRIFNKVTPPVIDLRHVHEADREFFNNLNNLRKRILNNELTILDVYYELISLNFNKLSQDKVRNLSMLTRTIYNYESFISQTDVKGLFYFLNRIIKNYGSNYSSQNGVQLMTVHAAKGLEFPVAIVASLEKDKFPMKIKDPKREKRTIFMKDTFYTPNEFLKYKEVTLDEENELDRQEEERIIYVAMTRAADLLILSCVGKTPDVINNIKNYLKKPNLNNVIINRHFTNNDTEKLKLNYSSFSTYNLCPYMYDLVYNYGFKVSSEKVTNFGTVFHEVMETVNLKLKDGEKISKEELILITQDIYKSMFDIKETEDEFNMLIDSILNYYNTYSLNQEVVECELPFELEHENYILNGEIDLIYKIKDSEIAILDYKNAEHDDNKIAHYEKQLYIYASALKEMTEFDKYEIKKGITHFVKTDYRHEVDITDEKINKQLYKLNEVALKIQNNEYPKRESGFCNVCKFQVICQN

SEQ ID NO: 11317 - protein, 168 aa, Methanobrevibacter gottschalkii
MNTTKNQSIVYDEKTIFKVKEMIVAGLNKLKLFKCKKSGNLDFYNDLKETFTEIALNLKELKLWNELDYFLSISLYIEYIVYKNSIDSSFGHCSFAIELLNFYINLIKTSSDYYLNLTEMSIKDFGIYQNETKTRYRQYRRKFHTDVYVLSGNFTEDQMYEIHASLRE

SEQ ID NO: 11318 - protein, 221 aa, Methanobrevibacter gottschalkii
MYFLDTNVPIGYTIIHDRWHENSKNFIDNNKNSIFWSNFVKSEYYNKLDNILDYIVKFLKSIVCILKVNEMDFYSYNSFEEHILNETRFCKLDYFKKQKILENFWNEYDFIVGISTKLYDCFYNYAFDFVNNYNNRDLRLNEIMRLHDCGLDNYLKYYDYALKLYKNGIHPPDCKIIIDAHDCGLTHDDLKFISNDNKLIDALSKIDTSNLRIIEFGLCNS

SEQ ID NO: 11319 - protein, 335 aa, Methanobrevibacter gottschalkii
MSVKELLKECGFLYFKEDYKNLLIKCEEVLKIDEKNPIALNYKAIAFYYFDMDDIALKILNDTQKLYPKNYYTLSIKSLVYIALKEYRKALDCCNEGLKIKNFDLLEINKIKALIYLDKIDDAYNFYNTIECPNFKFEEILIECEKYSEALNSYNSKLKENSQDLELIDNVKTLMVKYDLNVKPNWDEEFYISWIYHIKHNDNKNCPKCGSKLIPIVYGYPLEEALKQEKNGEIILGGCCINDEMGNLHCPNCKNDFYIDALHIDAKGPLYDYIVLKINNLDELLFDEICCSIYKIREDIEYFDDDEFKAFINHLISIGYLYEPVKGYIKLVDIH

SEQ ID NO: 11320 - protein, 630 aa, Methanobrevibacter gottschalkii
MDWQYSDYSKINPNAKKHFPFDNPRDNQLETVSEIADAINHGYKYIVLEAGTGTGKSAIAATLSNMSDSSYILTITKQLQDQYLRDFKDFKVVKGRSNFRCQNYINKSCSEGKCLTEGFECRFSLKNRENEIRKDNTCPYYYQKYLALHAKTVVSNYYYMFLELNYVKDFQKRDLLIFDEAHNLESTLMDELTLEFSKSDLEEYLDYNLRCEKIEELNSNNYLNWIEFINEIKEGYLEELNKLERLDKLELAEKIAFIKHQINDCSRFIEHLTHDPKIWIFDWDDDYQTAQFKPLKVDNYAKNTLFDYADVCIFMSATILDWKLFSKWLGIPEDEIYAIRHKSPFDINNNPITAYDEYNLSRKFIKVNAQKSIGSINEILDKHKNEKGIIHTVSGKCRDFLIDNIADERLIAHDRHNRSEMLEEFISSDEPLVLISPSMSEGVDLPGDLCRFQVIYKLPFPDWGDKQINQRAGIDREWYDYRTCLNLVQTHGRGVRYDGDYCHTYVIDSRFRSYIREAFPSKFLPDTFKESIEGREFDLKEKKRLMEIGDFHIENNDYESAIIFFKELLNNELFKNDIYPYLKLSNLYHETGLFECEVQVIMRFLSSGAEYNHFEKRLKELADMGYFDFN

SEQ ID NO: 11321 - protein, 483 aa, Methanobrevibacter gottschalkii
MLEWNICKNCGAILDNSQNTCLNCQGDVEKVNIDYLKKYLDNLNFVVKTLNIFTPYCTLTKDMGNIALESLIMDDLFKYFSYLGLGDNEITDNEVEFINSLLDTNFSKEDIQTLTDAELDKSLPASFKCLQEIDEYGQNFDMYQLNSCSELFNCFKLFGKFFITADNELDGDVLKIYSQYINYLESSLKSKNTALKPIDHLNYKPSKKEETHSLDEYLNELNKLVGLEKVKKDVNSLINLVQIRKLREKRGIKQPPMSLHLVFSGNPGTGKTTVARLLSKIYHEIGLLSEGHLIETDRSGLVGGYVGQTAIKTQEVIQSALGGILFIDEAYSLTSKSENDYGLEAVDTLLKAMEDHRDNLIVIVAGYPALMEKFLYSNPGLESRFNKFIYFEDYNEEELYNIFWLMCEESNLTLDEAGDNYIKEYFKRIYDNRSNNFANGRAVRNLFEEVITNQANRLAPKKEISDVELNTLTYQDFLVDENE

SEQ ID NO: 11322 - protein, 352 aa, Methanobrevibacter gottschalkii
MSEKICSNCGNKVDGSANFCPKCKSQSFRNINEVAKPKSGVVHKLFYKYQGGYFAVSKSKIAAITTFILFASLGFESPNLIISSVIIAFLVYIIGFAIRRINIINQNSKMFFRNNNLGLITDLMHLFAFWQDRETGKFALSKTKLISILIFFVFATSGLSLPNATPILAAVFGLIFALPVFVVGYGIHRLTTSRPVKKIVKQAEPDTGKKHDDASNAKKDIHIHEFDKYRAKLNELKVRYEIKEKNARNLIAKRFTPPQLTYDKFIASVDKSTMMFNSHAEVISNILDLASQDSKKIDDELNDRFDILEALVEKIDELIDELVLSLNDDEKEGNPSNLLNDLDDLIDSVKNY

SEQ ID NO: 11323 - protein, 172 aa, Methanobrevibacter gottschalkii
MNGAGAIDSANWTSADVGYETFKIPPQYENPYSSDFDMYEFDEDIDVFTIRYVNPNLMDLYGHFLNEYHGKKVNVAGHDAVHFTYYDRHDKTNNSVLWFSAGEEFYYINWIGSNITPAIKEVVKSSLKSNYTHKEFYSILNDNIKITILSIPLNLKGLIILLSSTHTTSEMV

SEQ ID NO: 11324 - protein, 296 aa, Methanobrevibacter gottschalkii
MTNHKHLRTVIEDIYSNGNKLTEELTARLIHEFRYSNLYIPSKKEDNKLNFIIYEDDDSKLTPLFTDLDEFRKFYKDEDVRALQNPFELYQNVLKTTDIEGYILNPASEKYLFKKEFILAINNIPKTDFYTTNPYSEEELLNMKRSVDNKNLERFIENRANIGDFEGLFEQMANSQLFALMLSDLKLNKEMISLKKSGPVAAMYTDNVGGIYATLFTSERKMDAVKTKKYKYSQLVNLATLVNFILTEDMDGLIVNPESDNVLVPRTTLLRYSLGFEMYANDERLSESMFYLFRIE

SEQ ID NO: 11325 - protein, 201 aa, Methanobrevibacter gottschalkii
MSELSQLIQINKNIEKQNEEIIRLLKVIACEKQEGENSDKSVIDLGELYLEDDASFEAEPKEGEIENLWRVGSLLDNSIDVGEVYFIEGTDIFRLSVKNNETSIDNLTGDGQANIFALEETIANESVKNNKSLEDSTVILSSEHSQNLPETLKICVEQGAKKVYMHLFASSQLVGAPQSLMELIKFDFYKNNEHLVEKLFK

SEQ ID NO: 11326 - protein, 101 aa, Methanobrevibacter gottschalkii
MSKFCPKCGEELVDDAKFCKNCGETIKTEQETQNNEVQNVENDHKIALILGYVCAILIPLFGLIFGIYLVTRKDSSKANYHGKIIIGIAIVIWIISFLLMM

SEQ ID NO: 11327 - protein, 88 aa, Methanobrevibacter gottschalkii
MREISIDSDFDVGEITSKINKLMSEWPIQLLDIIGPNWIVFGYDMKVKFVLIFDADFNDLETQIKLEDLRLNVIHHIESLKGLHIGIT

SEQ ID NO: 11328 - protein, 112 aa, Methanobrevibacter gottschalkii
MKNKNILLIAIAVLVVALIAVGAYTMFNGNTHLNVTDNTTGIDNSTGIDNNTTVVGDNSPLENLTNNNTTYKVYNPQSDSYVPVIGEKFDEEVNRWYTYDDQGVRYYNTRIN

SEQ ID NO: 11329 - protein, 363 aa, Methanobrevibacter gottschalkii
MTRQEKIIKTSVIGIVVNLILVAFKATIGMLVNSIAITLDAVNNLTDALSSIITIIGTKLAGKAPDKNHPYGYGRVEYFASVIIAAIVLWAGITAFMESWPKILNPDATSYTAVSLVIIAVAVLVKFALGKYVKNVGEDINSQALVASGSDAFFDAVLSLSTLIAAVISVFFHVSLEGILGVVISIVIIKASVDMLRETIDSMIGSRVDSELSRKLKEYICEIPEVYGAYDLSLHNYGPEDMRGSVHIEVDDDLTAFDIHSLTRNIVYKVYDEFSIVLTIGIYARNNDYKDVREDLYNIASKYEEIIEIHGFIVNKDEDYATFDIIVDFDADREKVKERIYSEIKSKHPELDYYIIDDYDISD

SEQ ID NO: 11330 - protein, 179 aa, Methanobrevibacter gottschalkii
MSIYDFEVKDGEGNTISLSQYKDKVLLIVNSATECGFTPQYTQLNEIYSEFNEDGFEILDFPCNQFGGQAPGTTEEITEVCRSKWLVPYAIFDKIEVNGENESPLYTYLKKEQPFKDITGEGSEEFKKILESINPNYMDNDDIKWNFTKFLVDRKGNAIQRFEPTEDLNDVKEAIKALL

SEQ ID NO: 11331 - protein, 895 aa, Methanobrevibacter gottschalkii
MESDNVSKNISTSLNKTQNKTLINNETYKKTTLEFSPIITEYTSGNIIYTVKAYSLLNYNGMKYKDPKYNSLIKIKLYTGNSFKSYSSHIDNNGIASIKVPDLSIGYHKVEIFIDNVQGATSYIKVIKSTTKVYAPTTIIKFKKNMNYKIKVVDSHNNPVKNIILKVKVYTDSKYNIYSIKTNSKGLATLKINKLSLKTHKIVITTNNKNYKINKNSKILIKKTIPKKIETLTVSSPNKTIQRGTSFTIKLTDDYNDIVKKVSIKVNIYTGKKFKTFKITTNNNGVAKLKTDKLSLGTHNLKIASNNKNYKFHKTFKITLVKTIIHDDIKTLVLKNITYYQTKDGKFNAKLGWYSKVGSSYQILRKTNENYNIISTVKSNSSFTTFYDKIDGNASYTYSVREIIVKNNDIILGPYDKEGLKLLKSPNITADFQNLKAEITWNKVEGATKYIIFRKIGRDANFKAIGIVNSNVLNYTDFYYKTPKQLRSILNSNTFVDPSFNNLFYTVRACTVKNTSGINQISYGSYLIDGDFHLEAPSIISLKDNEIKWGKVPNADGYLILKKNSDDDEWTIINQVAQNESNTITLKLNNIENSSYYSVKAFAKKNGEIIYSKFDSGFSLKNYSKDNSKYKILYFGDSITYGSPYKSNSNKHIFSIPYRVGELLGCVYYNPSIPGSTYHDLGQKDGKNIENTKYYRYRICREVVDQISIGELPGNWKELDNLKNSEGITNTYIDDYNIVVLAAGTNDYLDNSILGSINSVDTHTFNGALNHILNKIETASKTRVERGESPIKVIFVDLCYSDRAYDKTIKENRDVTKNKIGLTLNDYQNALNKQYNKWKNNNFLTLYNFKTRDYNIVNQENCPYTTSDNLHFSKFTYGQYGNAFASFLKENIFYN

SEQ ID NO: 11332 - protein, 438 aa, Methanobrevibacter gottschalkii
MKKIITYGTFDLFHKGHYNILKRAKMYGDYLIVGVTGENYDIGRGKLNVNDSLATRIENVQKTGFADEIIVEEYLGQKIGDIIKYDIDSFVIGDDWKGKFDHLSKYCNMIYLERTKGISSTQIREETFNQYTIGIVCDFVDDNQIINEAKLVNGFEVKNIFCEDEEIKNKFQEKYHLENSCEEFSELLELSDIIYVRCNISKRFNYIQKALNAGKHVIYDPPATFNYNELDELIHLAEQKNVILMENIKMVHIYVFNQLLWMTQGGLIGDILSFNCSISKIDINRPNLFYDLSVYTLLPMLKIMGQDYEKYDFIVKKDGEDIEFASMNFVYSNGRSIINVGNKIRVDNQLEIIGTEGTIRMKGEWWRSRNFEIHYPESQEIQLYNTNFEGNGFKYLLRELSRMLDNNRIDTRSIFKDESLKIVKILEQVKKIENNNGD

SEQ ID NO: 11333 - protein, 355 aa, Methanobrevibacter gottschalkii
MKHLFTIGPVEMYPETLKIGGKQVPYFRNDEFSNIILSINKGLKKLLFNKNGEIILLTSSGTGAMEATIMNCFTKEDNLIIINGGSFGHRFTQICDVHGIPYESVNIIFGETLTREMIEDKLNNGKFTGLLVNLDETSNGQLYDIKMLSDVCKKNNLVFVVDAISAFLADEVNMDKYSIDAVILSSQKALSLAPGLSIVALSEKMLKRVEVIDSESIYFDFKDYLKNAERGQTPFTPAVRVIIELEDMIKRLEKKGIYNIIKHTNDIASYFRKRVNEIGLEYPSYPLSNAVTPIIFPKNNADLVYKRLIEDYGFVVNPSGGNFAKSMFRVSHVGNQSIEDCEELILAISEIIKKL

SEQ ID NO: 11334 - protein, 552 aa, Methanobrevibacter gottschalkii
MSNMNSIQKNLFQLLVEFDEICKKYDIKYLLAAGASLGAVRNHRFMPWDDDIDLYITRENWNKLRHILETEKDVLPNGRSFVYKENTPYYSNPLPRYINDTTTTMYRNQALAGKACGQHLEIFIFDPIPRGEKEKQKYLDLLHVYTELLSPYFIVNKHATYEDWEKHYKLYKKYCDRIDKEGEEKVLNELENTLQQYSIEDCDEYCMCWGTKDYIYDKELFQEGQMGLFEGKEFPIGKHPEGILRIAYGDSWMYIPEIDEQIVHGGIKYDNISFKEYTDKYLHKINRDSAFEKFKINKRNNVDLYNVREKVRMLIAKEKVQVGCMHFKNNLKENEELLRSLLENGDYLELSERFEEYSILQSMNEVQKFKIFVPITDKNLATFLLNLLKQGKYYQINKYLNIRKLNESPLTKELITIENEVEFCRKLSIARYDNKDEELVQSIIDKYDGIFSDLLDIYRAKLWIKEINAKSSKDYKDINNLCNEILKKYPFDGETMAIQAKAKSELGQENESLELYKKSILNTRNGLIWQKVEDESGISRMEMERELIEEEN

SEQ ID NO: 11335 - protein, 400 aa, Methanobrevibacter gottschalkii
MKSKQDIQLELLQEIDDICSKNDLKYIFVGKNAFNAYVNHTIKNNNAHVSVAMTLGDINRFCNIIEKQNNPNRYVESMFTNPKYIPLYISYGNENTTDYHMIILNNNLHHGINIRIYPIIKSVTLDDEKIKIMDSKIYKEYKFRKFLNKKIINKKFLPIKIGISLLNNIYNISGFRKKYPDKIFNKIYIDNWDDIQNYSKVRIGKKIINSEYFKELTRYKVDNIELNYPKDTDNYFKQIYGRNIENVNVVLKPERKNAIVDTEIGYKKIINETKDLLDEIRSTHEELVWGRFKVRREKKCVDDVWKLVKMTNSQIKYIDFFEENIDYLLSLDLNDKSQFEEMEIILNPIIKKLQKYANKGMTFSIDEKTDSLIRKFLLLKNNEKLINKIDEINKLKYFVE

SEQ ID NO: 11336 - protein, 263 aa, Methanobrevibacter gottschalkii
MIIECTNDNIKTVFNYIGEDYGKCLYIFIDLKKYGLDDDNFNVWIQYNNDKICAIISEYYNGIQIYSKFEDLIIEEIVKFIKQKDVKTLFSIKPIINKINEFLPNYKQETGIVGELKKLIFEPNVHAYSAPISELEEIVKLVSEDENIGKPYGYDSLFSQYYERKTSNFGRNFVLRDKINNEIICHAGTYAELPEFAVIGGVITSKQYRGKGFSKGTLSALCHQLKSENKRVFSYYYIPSATKMHTSVGFKKIEEWSKLSKID

SEQ ID NO: 11337 - protein, 141 aa, Methanobrevibacter gottschalkii
MYKKILLPTDGSGYADQEIDRVTRLINEDGEIIILSVAPKLSTSAFQRRKDIEQLNKTFFEEAEDVVEKMKNKFPENYNIKTITKYGFPAETITNTAKEEGAELIVISASGKSGIHQFVIGSVAEKVLKLSEIDVLLVHNK

SEQ ID NO: 11338 - protein, 128 aa, Methanobrevibacter gottschalkii
MDLKKIAIVVSILLIIAIGSFAYISLNTQETKVDIITQNTIHNGDIITVQLKDLYRNGIPNQAIDLKILDDSGWAHNYNATTDELGIGQIQILGLENGNYTAHAKFNGTLFLKESANHVSFEVTDGYF

SEQ ID NO: 11339 - protein, 869 aa, Methanobrevibacter gottschalkii
MNIINSTSDLDYDFTIVLYNIENCIEDSIKSVINQKYDFKKVEIIFINDGSDKNHKIALNYQKKYPKNFFIVENDEKDMAESLNLGLNHSKGEYINFLNSGDILSNDTLSEVNSFFSKVTSSDVVGIRVDEGREKFSIDYSFIKSNQIIDISQYPEVINSILSSFFIKKESVNVNFDINPYEKSDLLFIDELLINSKIGFVIQPKVQKSSSNYLIKNKSTLNQFKHYYDSIYTFCNEQLGYIPNYIQYKIAIELASIVEIEDIDDILIDNMTASDAYSYINKVLNHISLSNIKGNIFINQHTQNFLLYLKNKDFHIDVDGNEVIFYCGSYVLNVLTRQNLWLDIIEIKEDYINFSGSITSYCEYDHISIEAIKEANGETEIIPVKFIDYSTTERKVKKFLSVPWVYSYNFDAHIQISDCENCKISFRYTYSEKETGITVMPNIKFRKFASLSKFSHYFIKDSRIVLFTQNSFLVMPYSLKKVFKFEFSSIKKILQSTAKNKIKTIGYKAIYLALFHYMKNKKIWLMGDRKEFADDNAEYLFKYCIKQKDDVNKYFVVNKNSPDYKRLNRECGNIVAFGSLKHKLLFTFSDKLISSQVNKFILNPFLRSNQFLYNGVLLHDECFIQHGIILHDLSSWIRKYIYNLSLFVTSAEAEWESIANTNYNFDTERIQLLGLPRYDNLVNNADKQILFVPTWRRDLDDPQLLVNSEYFNNINSILNNEKLIKLARDYGYSLVFRPHPELWRYLDLFDISDEFRISNESYSTLLSESSVMITDYSSIAFDFAYLKKPLIYYQTQDFENFHYEKGYFDYETMGFGEIIKTQEELINKIEFYMKNGSVLEDKYKQRSAKFFRFHDRNNSKRIYDWLIKH

SEQ ID NO: 11340 - protein, 867 aa, Methanobrevibacter gottschalkii
MADNFKFSIIVSNLSGYKDSIDSIISQELDFRQNVQLIIIKDSNILTSDIDEYITEYPNNILVLENKDNLNSRNFALRHASGEFINFMKAGDTFDKSCLKTVNDLFNSNTDINLVSIALFDPIYKNIIYKTPLSENRLIDINKVNNKEFNYYFHLPIYASFIRGTDYYFEDKNIDENGISVTSKILIDDDKFGFVKDIFCYHNPESEFSENINYRNVMGKLKLLNNIMQYADDNLNKNPEFLQHIVAKELEYIVRIEDLSQISTDLNKLNEFWNLMDAVLKNVSKKAIKSNNFLDNFVISFLLFIKNKSFAIDCSQHKVFFKTENYSMLNLHNQKLHFDVIEIKKGILNLSGYLKSICYSDNISVEALLKDENGDVKYYKGKFVEYPTTNRKTVTFLSHPWIFSYNFDFKIPINEKKIEKISFRTVYHENSEYVIWNNKISPRKYSNLSKFSHYSVKENMLVLLKDNSFYSMPLNAKSKYKFDLRAIFQILKERPQYYRGGIFYRTLIMLLYPFWKNRKIWMFMDRQDFADDNGEHLFKYALNQKDDVDKYYVLDKNASDFKRLSKSFKNVIAFGSFKHKLLFLFSQKIITSQPAVSLYNPFFSKNITMFAGFYPNVYFLQHGVTKDNVSSWLHKFNRNLSLISTTSDLEKKSFLDVGYNYDEDIIQTLGFTRYDNLNGENAKKQIVIMPTWRNYIKNEEDLKNSEYFKRWNSLINNNEFIEYAGKKGYEIIFKPHPNLYKFIDLFDKNNHVIIDYVKKYQEIFNESALLITDYSSIFFDFAYIKKPLIFYQYANDYHFDSENGYFNYESMGFGEVIKNEDDIVNKIKYYLDNDCVMEDLYRKRVDDFFKYTDRNNCMRTYEWIYKN

SEQ ID NO: 11341 - protein, 356 aa, Methanobrevibacter gottschalkii
MYKVVNGRKRIFYLDFIRALAIILVVLAHVTRAFFQNSPAGSFNMCFVSQFIDFGVIGVPLFLMISGALLLNKDYELGDFLKRRYSRVLVPFLFWAMIFPISKILFEGQVATVANFIKMYFDSNFWFVWMILGVYLFIPIINSFIKEYDMRGVEYFLLIWGGVMFLNTIGQYPFHQLELSYFAGYLGYFVLGYYLANKKFRLSDSKLLVISLLIFLTFTFINIDYTITMCILKNKLLYYKYETIVTVVQSAGLFMFIRYFALVSSNKPESIKNRIYLFFKDSFMFKIIFSISTFSYGIYLAHYNPLFFLKYEYKILFTFNPIIWLPIMMIAIIGSSWFILWIFDKIPGLRNINGAH

SEQ ID NO: 11342 - protein, 272 aa, Methanobrevibacter gottschalkii
MNKKIGFILALVVISLMMCSTVSAGLFDFMGGSDSSNDDNTFVVGFDAEFPPYGYKDDSGNYTGFDLDLAKEVCERNNWTFKAQPIDWDAKDVELDSGSIDCIWNGFTMDGREDNYTWSNPYFDNKQIIVVKSNSGINTPADLKGKIVETQKDSSALAALQGDNKTLADTFGTLTEVADYNTAFMDLESGACDAIAMDIGVAEYDIKNKNATSDYQILKESITSEKYGIGFKQGNTDLKDKVQSTLDDMFKDGTVAKIAQKYGISEDALIQP

SEQ ID NO: 11343 - protein, 216 aa, Methanobrevibacter gottschalkii
MILSNVIGQLLGGMVTSVEIFLLTLLFSLPLGLVVAGGRMSKFAPLRWLMKIYISIMRGTPLMLQLIIVFFAPYYVFGMSLSADYRFIAVIIAFTINYAAYFAEIYRGGIEAIPKGQYEAAQVLGYNKFETFFIIVLPQVFKIVLPSITNEVITLVKDTSLSFVIAIPEMFTVAKQIAAADASIAALLVAGIFYYVFNVIVAFVMEHLENRLDYYD

SEQ ID NO: 11344 - protein, 227 aa, Methanobrevibacter gottschalkii
MSLLEIKNLKKSFGDNVVLKDISLNVDKGEVLSIIGPSGSGKSTLLRCITDLEQEDSGIINFDGAFGLVFQDFNLFPHHSVIKNITNAPLRVQKRDRTEVFNHARHLLKKMGLEDKEDAYPCELSGGQQQRVSIARALAMNPDILFFDEPTSALDPELTGEILAVIKQLAADNMTMVIVTHEMNFARKVSDSIIFMENGVIVEEGSPEEVFTSNNKRMQEFLGKFND

SEQ ID NO: 11345 - protein, 503 aa, Methanobrevibacter gottschalkii
MENNDVDYLVISYYFPPRLETSGLVVARKIMEKNLNVDVIQSAYDESSDFNEIINKHINNRFPIDIKTKPDYIPFIFKYIDLGLKAIKKNYKKVYSRSYIYSNHFLALEYKFKNPNAEWTAEFSDPLLLNLYTGAIKNYPRAILDNSDYINKLNEKIEKFNEVSDTDFKALDNPNNTFFMAEYLTFIFADKIIFTNENQREVMLSVYDNELREFVMNKSKLEAHPTIDKKFYNFKDCEIRLDNNNINIAYFGTYYYIRHFESLFYAFEALNHKYKDKIKLYFFTSRAELLKVATGSLKISNNIIIEKPLKYFEFLNATTKFDILLINDTITKGHFKVNPYLPSKYSDYIGSGSDIWGICEEDSILSKKELMYKSSMTDYQSSCDVLIDILNDYGYEDQDYYFEDNIYEKRINELNWRFGFEFDERKKYLSRYNNLKEKNMTLNGELQTLMNKNKKLKAENDVLRKKNKNLKKENETLESKYNEIVNSNSWKITEPLRKLKNSK

SEQ ID NO: 11346 - protein, 240 aa, Methanobrevibacter gottschalkii
MVKVSVILTAFNEEKYIGKAIDSILKQTLTDFELIIVNDGSTDNTLNIINSFEDERIKLISHDNIGPGASRNKALNIAKGEYIMYLDGDDWYRVDGLEIAYSEAKDKDTDFTFYQMINYDEKTGKTYENDWFNLNIFDESFENTVFNINDFKGSIFDLSVGVCQKIYNTSFLKRIDAKFPEGILFEDMPFFYYVLLKADKISIIKQQLYYRRKHDGSITHVVDEKFLDTVPAGQELIFHY

SEQ ID NO: 11347 - protein, 90 aa, Methanobrevibacter gottschalkii
MENGWYDTYKFDLLAYKINGPRFALRDIEENYKIPLYMLIKKDYHSIKQSKYYQDYLDNLGPVKKKFFLDIIKSKNYNDYLALNSDKDNY

SEQ ID NO: 11348 - protein, 323 aa, Methanobrevibacter gottschalkii
MNITVGVIGAGALGTAISQNISGNVAEIILLLRNKELCDEINNCRYNSQYYPNYKLKDNIKATLETGDLSNCDIIFLAIPSSAFRKTLKDLQDIVKKDVIIVTTAKGIEYPSLKTMGNLIEEYFDENYVALSGPNFASEIMLNLPTVTNIASKSYENSVKVKKVLSTKQFKVKIIEDIYGIELCGILKNINAIANGICEGININENARFAVLTKGFNDTITIIKAIGGKSETVHEYCGFGDLILTSTSRESRNHTLGILYGQRLIINENANGVVFEGKNSIKAIRDICLKNNIHSDIVNFVYDVMIRKVTPTIAFNNLWENME

SEQ ID NO: 11349 - protein, 255 aa, Methanobrevibacter gottschalkii
MMIGVILSAGMGTRLRPLTDEIPKPLLEINNTTLLERMIRNCINAGIREFILIVGYEKEKVFEIAPKLEEKLDISIRIIENMEYDATNTSVSAYLASSYIEKENLDDFILINGDNVVDPEIITRIAKTDNTSLIVDNFKDLNGESFKLILKDVKKADNSIANGIISEIGKEIDIPSSTGEFIGVSKVIKEDVSRFNEILIRLIDEDRQNYYDFAYKPLSRDRKIDFVLTNGLKWTEIDDYNDWKTANGLIKEFEN

SEQ ID NO: 11350 - protein, 565 aa, Methanobrevibacter gottschalkii
MALIGKINNLKECLDNTKIYDSYYSAEIDESIIYLESRNGMDFTGNIFRITEELSTGKYGNFKIYVYAAKSIKAKIELFKRNYNLKITKIITDEDEATKILHKAKYIFTDSGIRYKYVKKPGQIFVNTWHGTPLKLMGFDNPSEKHNVGIIQRSFLFSDYILFPNEYMLDRMSHAYMIDKVYGGTFLLEGYPRNSVFLKDNSNYKEKLNLKDKEVFVYMPTFKGIVNNRKDEKQKNDVNKFLNKLNSKLNDNQILFVKFHPYNQSKIDFSKFNHIKEYPKNFENYDILNAADVLITDYSSVFFDFASTRRKIIIFNYDQDEYLKDRGLYFPLEDLPFPKVQNINDLVCELNSPKNYDDTKFTEEYCKYDSTNSAEHICETVINGKIECDYKIISNANKNILIYLGSMENNQAKSQLIQILENTDDNINIFLSFKPWNKNIKENHLNLLKDIPNTIEFLPLSYNLTPTFKEKVELNRFIKKGTDLNLELTEMFNRNYKRQYGDFKFDLIIDFISNDPEQSLTYACSNSKNAIIINEETQPKVYNQFNKIYRLSEFNIKNICDEIIR

SEQ ID NO: 11351 - protein, 284 aa, Methanobrevibacter gottschalkii
MNRLKAAKTISAITNPPIICIPLFLIICIILSNGNFNSFIVLESISLVFTSILPMIIIVYWAKRLDTDRDISNRKDRFTPLIVGIISYFIGFLVSLILGTNDFLTALLLCYSINTGVVLLITVKWKISVHTTGLSGPVGALILLLGPTGALFGIIYPILIWSRVTLEKHTSAQAIAGGVQGFFLTVLEMYMFISLFNFNVGNLVPLTDCIWYILAIISAPVILGILSYAHMNKIVFSAAVIIGFTVFLEYAPLSASVIYILVCLTSCLISLYAGEDYEWSDVLI

SEQ ID NO: 11352 - protein, 192 aa, Methanobrevibacter gottschalkii
MKVNLKPHAMMYPSPAVVASAYDNDGKVDACTLAFAAMCSHRPPAVMIAINSTLKRKTLASILKTKEFCLGFPSIEHVREVDYLGIESGYNLDKIDKIRFTAKKGEFVNAPIINEFKVSIECRVMDIKEVGSHTQITGEILNIQAEESVLDDRNKVVLGLLNPIAYDDISHSYFKMGGKIADGFKVGLKFRE

SEQ ID NO: 11353 - protein, 149 aa, Methanobrevibacter gottschalkii
MKSLVTYYSRSDITKKLAEDIANQLNCDIEEIKPKVDYHGKLGYARGIKDGRAGKIVELESLKYNPQDYDVVYVGGPVWAAKAANPVISYLKENEGKFNNVKFFITAGSKGFESSLEQMENTSMKPLKTLQLRAKEVKNEDYDLTSFLE

SEQ ID NO: 11354 - protein, 156 aa, Methanobrevibacter gottschalkii
MINEEFRLIDASELPISKLITIIAKCQSFYLNNMLNESGINSTQLHILFEISHQNNINQEKIAARCSINKGAVARSIKKLEDMGLVIREIDENNRRQNKVSLTQKGEELLNKSIKILNDLEQEVFDDETINKEELQNVLKEITIKIMEITEREVKN

SEQ ID NO: 11355 - protein, 461 aa, Methanobrevibacter gottschalkii
MSKNDNIKIITGDPKKAIVKLAIPMMISMLLIMMYNIADSIWVAGLGADALAAIGFITPLFMVLVGLGNGIGAGANSLIARNIGAKNYKQANNSGLHAILLSVIVSVIFTILIEGFMVPILQFMGAGDTIQYAMDYSYIIFGFLFIFVYSGVASAIFRSEGDMKRSTIAIAITAVLNIILDPIFIYILNLGIAGAAWATVISATMSCVIMSYWIWGKKDLYLDLSLKNFDYQTSLMVDTLQVAIPSTLENIVFSALAIIINSMLVLAAGTTAVAVYTASMRIVQLAMIPLIGLGTAVLTVAGVAYGAHNYKNLKTAHSYSIKVGFLISIILGAIMFVFSSPIATIFSYTAASASLSPQIATAISVLSLFVLAIPHGIMSSMMFQGVGKGTYSLLITLLRSLILETVFAYLFCFTFGWGLTGIYAGVVFGCFVGGTIGYVWAKLFIRRFKQIAIRKYAPQEN

SEQ ID NO: 11356 - protein, 146 aa, Methanobrevibacter gottschalkii
MEFILNNKKYSILNHELFINYLMVDNYFRNHYSKYDYEIRFDFITPLLNKEKIKFEDILAGTKNLEELIEREEINFIPPGLKINQHTNGNFKITYQDLDFNNITVGEAIPFLIALNSLLTYKPIVTLSQIEEELENFIEKFRSYNK

SEQ ID NO: 11357 - protein, 216 aa, Methanobrevibacter gottschalkii
MYCPNCNSENNDSAKFCKKCGTPLKKEVSHKKIINSINDEKSSKDDITKYIIIALIIIAIALAGAFAYIGFGNHNDDGQTQVQNNASSSPNPVQSTQSSQPQQSSSAQSAAMDILGGSFSTGSSLSAKTYASIYVGSQHSGEKVIIQIKYSRDGSSLNNGNMVPKTVDSSGYINVKSADSFKYYPDFAEINLFDTNKNLLDTQSVSLSPDSSTQTF

SEQ ID NO: 11358 - protein, 159 aa, Methanobrevibacter gottschalkii
DSDLDDLNDDSDLDEFDDDSDLDEFDDDSDLEDVDDSDFEDYDMENYDFKHNLLNLNITYKACSSRLGATSNLNNHSVNETKKDSNPNTESIEHAKKAKSVLKSINLPSENQSNYDKNISGNNNEKSNNEENKQGNNYLTIISIILVLILVIIACKKLY

SEQ ID NO: 11359 - protein, 165 aa, Methanobrevibacter gottschalkii
MSGIPKKEIKKHIPVKDLDKRIKKLEKDVKVLNRLHFIKACYSGMSIKEAAELNGISYSNAYVWFNRWNEEGPEGIIPKYAGGRPSYLTSDEKIELEKLLQQEEVITTEIVHKIIKDNFGVDYSHKQVRIIVKSLGYSYSKPYPINIETDSQKVEIFKKNSHNSI

SEQ ID NO: 11360 - protein, 54 aa, Methanobrevibacter gottschalkii
MIIGEGHIFSDNDFKEDLLNVGFKIVKFNRGEATYDFAFIKSDYFNYWPLLKRE

SEQ ID NO: 11361 - protein, 459 aa, Methanobrevibacter gottschalkii
MQIIDKIKLKLLNSSNSYNFYKNNYLAQNIQLKLLNEELEDKNSEINKFNEIVLEQGNNLKLLNEELEDKNSEINKFNEIVLGQGNNLKLLNEELEDKNSEINRVNYRIDKMLSFDLLFKENLTMFNTHIKEIFDNQRDFASNLNEYYEKLSYRSNEVNESLIKFETMLSKSNRGMDEKSDVILDFIKNENIRINNHVEMLFNHHVKEFNKFNKNIKNSMDFIENNYKNCRKYFFKGNESLLEPYLDTDFMFNFCYFNNIELLSYSPKENLILLKNKDGIVIGTNNHLWTIMEIYGLNEYMIPILFYFDDFVVFDIGMNRAYASLSFANMQNCSSVFGFEIDEFVYSKAIDNISLNPNLANKITTYNFGLSDEDGIVELYCYEGFDGLNTMMYDFLEANPSLNLYKDKLDVKKVHVKKASEVILDIISKNNITSNIVLKIDTEGAEYKIVYDLIKIRFN

SEQ ID NO: 11362 - protein, 464 aa, Methanobrevibacter gottschalkii
MVPIKEFTQPKISIILNLNDVTEKYFEKCFDSICNQELDYVEIICVENENYKFDKFQKYLLEYEFIKIFDEYYLQNNFNLIINSDYILFLNAKDWLLFVGLKHAYNLAIENDMDILINSYNIFHEFSGEIEDPYQEEYAQLNNLNSFSGNDFKNILFNMPKYSFNLYKTDFIKKLNLKIPLDLTSQISFFINSSMMTSRIGYNNKPLLYNRLNEENDNLNYYNLICNDFNFGICENNLEINMDSIIDTYFNILYFLEKEGIYNCNKYYLWNYIFRVFRRIYLQNFKNNIVIFKNIHDFCTNVFSKYHNDLVLNLKIENLTFYRSILKSNSIYELELLYENNRLVLQNEGKDKIINEKNNLISNLNNDLANSSKKLDVEIKKYLNILDDKDNRINILEEKYSYQVHENNLLIAKLSEVETSRSWRLTKIFRKIGMFKSIIVLVTVGFIIFLVMYILIIMLMLIIK

SEQ ID NO: 11363 - protein, 856 aa, Methanobrevibacter gottschalkii
MGFKVSIIIPVFNVEFYIESCILSLQNQTIGFENLEIIFIDDCSTDNTSIIIEYYAKKYKNIRAIYCNENSGVAGKPRNIGMVNATSDYIMFIDPDDTFSKDACEVLYDKISKSKVDVVSGLHSKKIHGDTDIIFPGLLISTFTNPNDSWQIRKKQLAEYLKDFDELYFESLDEMPYLLGNFAIMSKIYRKSFLFSNNINFPEEIPGEDSVFLLNVFLNAKGIIFINKIIFSYYTSRDDEDNASLTHQSDLSRNLGRLKAYKMMLKLSKDHDKLDEFVNYLLCGKMNYFLNQYVNNKNLSKKEISIIINESYDLFTLINNSNCKFDSDYKKLVELIIDKNVDELYKYSENDVFHIVTNNHETKYIKDIKVAVIMDPFTYTSYSNEFEDIIIEPSSWLETFENEKPDLFFCESAYSGVNKKSVINGVAIEDNITPWQGKIGLNLISGNDNRKILFDILNYCNNHNIPTIFWNKEDPTSFDIKQYNFIDTSLHFDYIFTTDEETIPRYNARGHDNVYPLLFASQIKLFNPIEYKKRTNDIIFAGSWYNQFSERSNVMREFFNKIINSDYNLKIYDRASEINSINRKFPKEYSRYVFPKVHFDKMPSVYKESKISLNINTVTNSYTMFARRVFELMSSNTLVLSNYSKGIFDLFKDNVIYLDKLSSLNLDKIDIENICENNLYDVLENHTYYNRFKYILNIIGFKFKEENNNLIIIYGLNNKNELEIILNDFESIKYVNKTCLIYVKDNNLLNSLNERFIEDVKFIGIKELIMISEEFNQSYFFIIRDLFHPLEKDFIRRAFLHYNYLDKNIGVKQGNPKYNLAKTIEYKNILFNIELLDKVLEGLLKYRLNKLTILNI

SEQ ID NO: 11364 - protein, 411 aa, Methanobrevibacter gottschalkii
MKICILGQGYIGLPTAALFSLNHCEVIGVDIFEDMINNLNKGIIHIEEPGISKIIKKAIESNVYRASLIPEKADAFIITVPTPYIVENYSCDLSYVTTACKSILPYIEKGNTVIIESTIAPMSTDDVIKPIFENAGFIIGEDLFLAHCPERVIPGKIIDELIHNDRIIGGVTPKCAVKASEVYDQFVEGELILTEAKTAELSKCMENTFRDVNIALANELTKICTEIGVNVLDVIEMANKHPRVNLHSPGPGVGGHCLAIDPYFIYAKAPKTAHIIKLARDTNKSMPDFVCENVEKIISKGKIAILGVSYKGNIGDDRESPSYEIIAKLCSKYEISIHDPHIDNPNFVSLGTAVNGADLILVLCDHNEFKNMDYDLIKDKMEKAIIFDTKNIIKEVPDDIKLFNYGNLYSI

SEQ ID NO: 11365 - protein, 145 aa, Methanobrevibacter gottschalkii
MDKKWIVLTIFLVIFGFLILNGLNNSIHVGDSYFSLPEGYVEGNIVKYNDVNITNGTTSLRIIEYNDNNIQEHIDKYVNYSTNHNYSTKINNFNVDGMNVYKSEIIQNNKTFHYWFIKKDKVYEIVTWDGNSYTDNTVFNLIKSN

SEQ ID NO: 11366 - protein, 288 aa, Methanobrevibacter gottschalkii
MKNLIKINVDFEELDNYKFIMDEPFSLEVNYNHVKYNFIIKFSSNNNNLICCAPGAQDRNKRTSQGELIKPPYFDRWSWFKYFEESFIAFSDPIFYYDKEITLGWCVGDKNQWYAENISLIIQKLAKNQEIINENILFFASSGGGFVSIILATLIKGSKCVVNNSQFSIFNFYETHINRLFKFLENSFRLNKSEITDKIDYRLDLIKLFKKENYMPSITYYVNACSKYDIKYHAMPFIENVMFIPQFKDNLNVHYYHEYKDFPHNPMSTDKILVILKNFIKINLYNNF

SEQ ID NO: 11367 - protein, 177 aa, Methanobrevibacter gottschalkii
MPTWRLQLESEDLFLNSKYYETLNNFLNNKELLELLNKNDYKLVFKPHAELMEYLDLLNVDNDVYISINESYQDLFNESAILITDYSSVFFDFAYLKKPVIYYQDNNDYHYDEGYFDYETMGFGEVISDENLLIEKIKFYLENNCQMEYKYKCNVENFFKFNDKKNCERVYNWILNN

SEQ ID NO: 11368 - protein, 641 aa, Methanobrevibacter gottschalkii
MKYNFKFSIIIAVYNAEKYLNEAIDSIIDQSFDFEKNTQLILVDDGSSDNSLEIALQYQKDFPDNILVLSKENGGQASARNLGLKYATGKYVNFLDSDDYLSNNTLEEVYNFFENHFDEIDILAIPMILFERVNKPHRLNYKFNENKIIDLIEDPNNPLLSSSSSFIKSDAIRDYKFDINLVNLEDALVINKILLDKKKYAILNTCKYYYRQRNLRNSTVDTINSKKEYFTDRLKSFYCNIIDYCLSKEGNIPKFIQYLMAYDLQWLLKLPNLDVLETEIEVQEFWDCLYYVLGFISTNVVYGNKNILNDVKPFFLYLLGEEKYISLDDDGSVLLNVGTHNVDKLSRHKIWLDIIDIKKDILNISGIFLTNFPNQNISIKVIKESEKHDKEYFCQYKKYNSFERKNRTFLGFDWIFPYNFDVKIPLVKNESSKLRFVVNYQDDEHLFSFESSLGLNYGVRLSDFSACISKKHYIVLFKYSKLFILPYKYSSMLRYEFSNIKKTIKDKPNFFLSSIFIRLAYYILYPLFSNKKIWIFSDRPDFADDNAKHLFKYAINQDDDVKKFFVLNKDSNSFNDMKNENKNVISFSSLKHRFLYLYAEKIISSYVNEDFINPFFNYNKDLFDGLITSQRVFFTAWSNQR

SEQ ID NO: 11369 - protein, 268 aa, Methanobrevibacter gottschalkii
MELVKKLDDVKNLTNNKLIGAPDLINSEIQFHGRNNILVCEGTINLVNSNIVFQGNNSIIYLSYTKHDYKLMVFVRSDSTIFLGKNNEIGSKFNINIQEHQNLIIGDDCIIGNDVTIRTCDTRAIYDFNTKKRINFSESIFIGDHVWIDHFSYISRGVHVGSGAIVAVHSFLSPYCKVHSNNYVMGNPIKVFNDNVFFTKEFTGSYNVEDTMNFSSYKSDIFHYDFVLNETLAMDNIDKILKDLTVDERLDFLEKLFIKNKRKNRFYY

SEQ ID NO: 11370 - protein, 355 aa, Methanobrevibacter gottschalkii
MGVNMVSEFTVFGSCTCRDIFNSTINKNYKDYFHINPSGIRVSYISLMHPPVDYTEESLIIHPETKKNINFSNWIKQDLDKSFLNELKKNKSEYLIIDTYYDVNFGIIEFENKNYITNNLHIDKTEFYKNLNYKKVMTIQSNKNEYLKLWKENCNLFFNFLEKYCPDTKIILNPTRHVTNLIRADGTISEMGIYKKISEKYNPYRDLLDSHIIENFNVDVLYFDENTLASENSIWGASSLHYNTSYFMDVTKQLNEFIKRNKILDNANEKRLNNLFKKQNRNLLTFKIQLNNNEKINKIVHKFKQNNTYKNLLKNNNEITNNITELKDILTSNEYAFLNSINNSKLSQIKQLKLK

SEQ ID NO: 11371 - protein, 256 aa, Methanobrevibacter gottschalkii
MSLIKENEIFLFEEIVKKNFASKYKGSVLGILWSVLKPLLIMILLTIIFSTLFGGSIKNYPVYFLSAKCIFDFFTAGTNSAMNAIKGNKNILKRTAAPKHAFVLGSIIAEFINFLITLVILVAVMIVTKAPFNINTIPFTILPIISLLMMITGIGFILSILCVYYTDIQHLWSVVTLMAMYASAIFYPMDIIPEPYHQYMILNPIFWIIDQFRHMTLWQSMPSTLNLINSLVLSTIILVIGIIVYIVYEKKVAMRF

SEQ ID NO: 11372 - protein, 369 aa, Methanobrevibacter gottschalkii
MNKRDKIKTNLIKKYNISPEESEILLTKIEKRIAKENARKREILSKNMFNESKEEFNQPEHKIRNINSETNKYNDFETITQNISSKESEKLKKEENNNVDTILSNIIPNYDQEISIELNNVDLIFEVETDKIDNIKENIIRTLKRNKSKKTKFQALNNISFKINKGEKVGIIGYNGAGKSTLLNVITGIYPINNGTVTTHGKISPLLSLGAGFDHNYSGRKNIYLNGAVLGYSKKFLEEKEEEIIEFSELGEFIDFPIKNYSSGMLAKLGFSIATIVEPDILIIDEILGVGDVNFQRKSSDKIKSLMDGGTTVLLVSHSIPQIREICDKAIWIDKGKVREIGEVNKVCDHYLKDAEKASNKQLANIKFR

SEQ ID NO: 11373 - protein, 397 aa, Methanobrevibacter gottschalkii
MDLIVAKFGGTSVGNGKRIRKAAESVAREYKKGSEIVVVVSAVNKTTDDLINITNDAITCNLTEKQHAEIVGMGERTSVRLFSATLESLGIKSLFIDPYSELWPIITDSNYMEARIDLDKTKEKVNNLKSLLDQGIVPVVCGFLGKCKNQVTTLGRGGSDITAFLIGECLNATEVIIVTDVDGVLSTDPQKISEAELLESITVDEMKTLATHGAQVLHPHALDYKHPKIDAKIINYNKEDLKAEGTYITGPKDYKPIDLYENPVASITIVGKSLLNKVGIVSALSNILLENGINLFKMNPHHNSITVFIDSEDADKAYELYHDHVVKSEDLSSISRDKDTAMFSITSPEISEITLANLLTENDIDAVLINYTKTEILLFVEWEFKYEVSKLLNTYKN

SEQ ID NO: 11374 - protein, 260 aa, Methanobrevibacter gottschalkii
MENMINSLKKLGLNRYEALAYIGLNKIKTGQADEISEVSKLPRSRIYDVLKELNRKGFVEIEGGKPLKYKIIPPSKIFKEEKNKLIEELENTEKKLEKLYNDELDEIQAPIWLIHSSENIIEKEVGIIRKARKTITCSIGFLLEGEGKAMIKAFNEIPRNVEIKILANQFCYVNNHKIDIIKIFKDTKLDNLEIIPSDLPMMKLLIVDEKELIRTFTRFTGENNEILPQTAIGVHNTYEDICKNFSRHILKEFDKNRQEN

SEQ ID NO: 11375 - protein, 139 aa, Methanobrevibacter gottschalkii
MANFNSLKEAREFFYKDKFAINTGVTLDELTEDKAICSLMLNDEHRNAYGGVMGGVIFTLADFAFAVLSNQIHQLTVAQQVSINYLSAPKGDMLIAEAACRKSGRTSSIVIVDISDDLGCDVAQFVGTGFKLKNSKIRD

SEQ ID NO: 11376 - protein, 158 aa, Methanobrevibacter gottschalkii
MSELTFKIAERKDSRLILEYIKKLADYEKRSDEVIATEKSIEKWIFDEKQAEVLFALEDRHIVGFALYFLSFSTYIGNVNMHLEDLFIDPEYRRRGYGKALLKELGKIVIDRDYGRFEWTCLSWNRPSIDFYLSIGAEQKDWDVFHFTGDALKDFVKE

SEQ ID NO: 11377 - protein, 244 aa, Methanobrevibacter gottschalkii
MYLLSNIDAVDWSIDDGYDAVDVCPFCEMPVPDYVRSCVVCGLSIRDIDFEENSINKYTDFRESFDKLFDDMDSKLGNMIFIKDDDELFEFKTFYNSFMLNYDYHEFLEFYNRADKNLEMQQIAELFINDKLNKSLGTESEFDDYAKYLIYYCNYYIANDDLDDAFIYYAQMLLLMSNYSGDNNGELLISVYLFDSFSCYNCLYGSQHSFDISKLFDEAINTFRIEEYNKNHKFILEKLEAMFG

SEQ ID NO: 11378 - protein, 149 aa, Methanobrevibacter gottschalkii
MKNDYAIKLTSNFILSYLKFIVDTDEIYKNPKIKKFYKKSEHTIPYKANLFDMDLCGVMFRDPAGNFIKYTDFFAVTIPRKYDLKKYKCRKKLKKVTESYLDDKYSVWTDSVDIINEFVDLKDREFDEMLNIENMIGMRRSYARTLLIV

SEQ ID NO: 11379 - protein, 111 aa, Methanobrevibacter gottschalkii
MDEGLFQDKNLKDKLFNEYPHILKAIEKEGYILDYLSFDVFTEIRFEDDVVGFISFSRFDIVENYFAIDEAYIIPEYRGNNLLFEHLNNLFLLDNFRYFPRKPTKAFINVC

SEQ ID NO: 11380 - protein, 444 aa, Methanobrevibacter gottschalkii
MSYVDEVIETIIEQNPGEAEFHQALREVMESIRVVVEENEEEYKKNALLERLANPERQIKFRVPWVDDNGQVQVNTGYRVQFNSAIGPYKGGLRFHSSVNIGIIKFLGFEQIFKNSLTGLPIGGGKGGSNFDPKGKSDREVMAFCQSFMTELYRHIGADTDVPAGDIGVGAREVGFLFGQYKRLSNLYEGVLTGKGLTFGGSLTRTEATGYGLLYFTNAMLKANDIDIAGKTIAVSGAGNVAIYAIEKAQQLGGKPVTCSDSTGWIYDSEGIDVELLKEIKEVKRERLTAYAKARESAEYHEGKGVWTVKCDIALPCATQNELQLEDAKSLVENGVLAVAEGANMPTTIEATEYLQENDVLFAPGKASNAGGVATSALEMAQNSQRLSWTFEEVDAKLQNIMENIFANAAAAAEEYGLDKNYVAGANIAGFKKVVEAMNAQGIV

SEQ ID NO: 11381 - protein, 83 aa, Methanobrevibacter gottschalkii
MSVEKLTKSQYNDLKNSYLTKNRTMHSLYAEINKENKVDKHLFFKLINKIRQEEGLNDFYTMKKEKKRNNIIENLDKSPKYYN

SEQ ID NO: 11382 - protein, 414 aa, Methanobrevibacter gottschalkii
MAEVSSKELYEFKKTLKELSGKRGRGTELVSVYIPHDKQLSDVGKHMRDELGQSANIKSKQTRKNVQSAIEVILQSIRLYKQPPENGLVLFVGMIPKGGPGTEKMEKYILEPPEPITTYWYKCNNEFFIEPLEEIIEERDTYGLAVVDRKEATVATLKGKKVNILTHLTSGVPGKHKAGGQSQRRFDRVIDLAAHEFKKRIGEHMNDDFLELKDDLKGIIVGGPGFTKEEFIQGDYLQYELKDKIIATVDTSYTGEPGIREVIDKSADILDNLDVMHEKKQVQRFLKELTKDKGLCSYGENQVRNNLIMGAVDTLLLSEDLSSMRKTFECTNCGTQIEVTVKTQAEADKFNERCPNCNDTFKEVASKDLTDEFVEKAEEMNTNVEFISTETEEGMQLFRAFGGIAAILRYYVEY

SEQ ID NO: 11383 - protein, 355 aa, Methanobrevibacter gottschalkii
MKAAKNIKIIKRNKNVMKWKIGNVKISNQIVLAPMAGICDYAFRSIIKSMGCGLIETEMVSDKAIMYNNFKTQEMLFMKDEERPISQQIFGCGTDSFKIASKYIYENMKPDIIDINMGCPVKKVAIKSKAGSALLKNPEKARSIVETVVDSVPIPVTVKIRSGWDKSSINAVEMAQIIEEAGASAITVHPRTRHQRYDIPADWSIIKDVKNHVSIPVIGNGDIKSCYDAKRMLDETGCDAIMIGRATLGNPWLVKQCIDYIDYGMEPEKISVEEKINMAKRHADIIEKTQAEKLAISRMRTQTAYYMKGMYNTADIKPKLFKMNSKEEIFSLLDEYLASHKQHLREFVKQNQILS

SEQ ID NO: 11384 - protein, 322 aa, Methanobrevibacter gottschalkii
MIEKIEITQRFNFKRLNRHYECFTIDFSNNSAYYKISERGSGDKFLSESDLCDDSWIEILSGLRRNMTSEICHFNLKQADKFLNDFNKLNLFKDFRSENFSYFEKIELIYSCNIIIYSTDNYEEYAFKNNFPINWIKFGEILKELLNFDVLHLDYQKQMVTPLFYDVCLDGVYYDGELLKLKAIEFGHYRTYPYDIPKPRLIIDFNKKRIDGYIDKNLSSGDENAILSLLEKYHVYNWIFDEYHNKSNTRDPDDLEGYDWYLEMVFEEGIIWHLFGYNDYPDTYVCLAREVEKLTGMDLLEINTISGEDLVLFDKFSKMLLM

SEQ ID NO: 11385 - protein, 172 aa, Methanobrevibacter gottschalkii
MVFRRCPQCGSTSDDQYGFCIKCGWEFAKIDATKNLCPLCGHENPNEADFCVKCGAPLVFKNHPNEEQRNITPIVINKEVAGTPIQKNSGGWIKWIIILGYIFSILGGLLGLIIAVYLVTRKEATVRKHGIIQLAIFAFYIVLIAALYATGMIPADAITNYQQLIAGNMTLP

SEQ ID NO: 11386 - protein, 151 aa, Methanobrevibacter gottschalkii
MIIRKFNPNDLKRVFEIENMSFDQSYGIKMFQQLYEMGIGFLVAEHEGHVIGYVMFWIKYEFNGHIISIAVDENYRRLGAGTKLLVKAISILSMLNIDNIYLEVNEHNDGAIEFYRRFNFQIDRTVPNYYASGDGAVIMYLPLRKGHISSN

SEQ ID NO: 11387 - protein, 129 aa, Methanobrevibacter gottschalkii
MWQDFGDYILSEAGDDPVKIAEIGVGKFDKISEILSEKKNITVLKTDIHPKDSTVIKDDVTNPNLELYKDVDIIYSIRPPSELQPHLINLAEKINSQLIIKPLTNEDLNTGRVKMKLKNYKKASFYILR

SEQ ID NO: 11388 - protein, 809 aa, Methanobrevibacter gottschalkii
MEKLLKKYNTTPDGLSESEVLKRHERYGLNELDEKKPTPPIILFLSQFADILIALLIIAAIASFAIGDTIDAGVILLAVLLNVIIGFIQEYRSIRAVNSLKDLMVKKAIVKRNNEVLEVDARFLTIGDIVILEEGNKSPADLILIESNDINCDESFLTGESEAVIKEEKDAVFMDSNIISGHGLGIVTDIGMDTEIGKIAEIVHEEDEKTPLAVKVGKLGKILSAIAILVCTVIFILELIQGAGIVETFMTAVSLAVAAIPEGLPAVLTLTLALGMSEMASSDALVKRLLSVETLGSCTIICSDKTGTLTDNKMSVVESYLLNKDKLLLISKLCNNAIIKDNALIGNQTDGAILRFAQNYETSLERIDEIPLDSNRKMMTTIHRLDSENKIVLSKGAPEIILNNCKYIDNNGSIEILDEEIKETVVKRIDEMSDEALRVIGFAYKINDDERPEENLIFTGLLGLIDPPKKNAKKAVKECINAGIKVRMITGDHEKTASAIAKQLGILTDGRVITGKELEKISDEEYLAIADDIQVYARVKPAQKMRIVEALKDLGNIVAMTGDGINDAPALKKASIGIAMGDGTDVSKESSDMILQDNDFSTIVKAIKEGRKIYDNIKRFVKFQVSTNVGAILTIVGTSLLNLPLPFNPAQLLWLNIVMDGPPAQTLGMEGAEKDTMARPPETGDILTKKTLTEIFLLGLVMATGTILVFSWEIYSGAPTEKAMSVAFTLFVVYQLFNAFNGRSNSTKSSKYLYIGLALSFMLQLLIIYIPQLQIIFRTTAIGIAEWTIIIIVASTIIAAQKIMNKVIK

SEQ ID NO: 11389 - protein, 261 aa, Methanobrevibacter gottschalkii
MKIFLLGGTKDSINIIKFIKKNYDAYILTTTTTEYGAKLAKEGGSDDTIARPLPKEEIIDMIISKNYDILIDATHPFAEHITQTSASIENELKIPYLRFERPITNLENIDTSNVYYVNSFIEAGKLIASEFSKGNVLHFAGANTMEDILKNIPTDRFYPRILKVEKSVEKCNELNINPNHIIPMTGAASTKENIELIEKYNASVIITKESGEIGGVIDKIEAANAKNIAVVMIRRPQIKEINKKNIVSNLDELDVELKNFF

SEQ ID NO: 11390 - protein, 102 aa, Methanobrevibacter gottschalkii
MNQARIKLTGTDPEKLAYVCDQLKKIAERTGVDLSGPIPLPTKKLVVPTRKSPDGEGKASWEKWELRIHKRLIGIGADERAMRQVMKINVPDNVSIEIELKG

SEQ ID NO: 11391 - protein, 413 aa, Methanobrevibacter gottschalkii
MAKEKEHLNLAFIGHVDHGKSTLVGHLLLKAGAIAEQQLDDGENKFRFVMDKLGEERERGVTIDLAHQKFSTKKYDYTVVDCPGHRDFVKNMITGASQADAGVLVVAADDGVMPQTKEHVFLSRTLGIGQLIVAINKIDVVDYSEDKYNELKEEVANLIKTVGFNPADVPFIPLSAFEGDNIKEASENTPWYKGDSLMDALDKLTPPEKPTDLPLRIPIQDVYSITGVGTVPVGRVETGIMKKGENVIFEPAGASGEVKSIEMHHEVFDVAEPGDNIGFNVRGVGKNDIRRGDVAGHTDNAPTVAKEFDAQVVVLQHPGVITVGYTPVFHCHTSQVACTFLELSKKLNPATGAVDEENPDFLKTGNAAIVKIKPTKPMCLENAKEIPQMGRFAIRDMGQTVAAGLCLNVTPAK

SEQ ID NO: 11392 - protein, 727 aa, Methanobrevibacter gottschalkii
MIAKIKELMYKPDQIRNIGICAHIDHGKTTLSDNLLAGAGMISEELAGDQRFLDFDEQEQARGITIDAANVSMVHDYKDDEYLINLIDTPGHVDFGGDVTRAMRAVDGAVVVVCAVEGIMPQTETVFRQALKENVKPVLFINKVDRLINELKLEPEELQKRFINIYMEANKLIKNMAPEDKKDDWSLDFTDGSVAFGSAYHNWAINVPTMQETGVNFNDIIQYCNEDKQKELAQKVPLSDVLLGMVVEHLPSPKEAQVYRVPNIWDGDIESPAGECMVTTSPDGPLAVMVTNVSVDKHAGEIATGRVYGGAIEKGTEVYLVGSHGKSRVQQVGVYFGPERVNTDKVPAGNIVYVAGAKGAIAGETLCDPEHKIVEFEGLEHISEPVVTVAVEAKNTKDLPKLIEVLRQVGKEDPTVKIDINEETGEHLVSGMGELHLEVIGYRIGEKGVDITTSEPIVVYRETVRQLSPQVEGKSPNKHNRFYITVEPIEPELYTAIQDGDIKEGKVKGKEGANDFMEHGLEKEEARRVWAVHNRSIFLNMTRGIQYLDEVKELLIEGFESALENGPLGNEIAMGLKFKLHDAKLHEDAVHRGPAQVLPAIRNAILGSMMLAEPALLEPMQKVVIDTPNDYMGSCTREIQNRRGQIVNMGQETGDMARIESKVPVAEMFGFAGDIRSAAEGRCLWSTEIAGFEPLPREMQNQIVKEIRQRKGLSAEPFPASHYLGDL

SEQ ID NO: 11393 - protein, 186 aa, Methanobrevibacter gottschalkii
MSKLFDKWDLNEVKVEDLGLVKYICLDETLVPHTSGRHVKRQFAKSKVSIVERLMNKIMRTHLNSGKKNKAYNIVKESLEIINKRTKQNPVQILVKAVENTAPREETTRIKYGGIGYQVAVDISPQRRVDLSLGFLTRGTLQSSFKNRKSVAECLADELILASEEDSRSFALRKAEEKERVAKAAH

SEQ ID NO: 11394 - protein, 141 aa, Methanobrevibacter gottschalkii
MPGLFAAKKLKKNRQNFKWKDVDYKRRALRLDVKADPLEGAPQARGIVIEKVGIEAKQPNSAIRKCVRVQLIKNGKQLTAFAPGDGAIGFIDEHDEVMIEGIGGPSGRSMGDIPGVRWKVSKVNNVALSEMVSGKIEKPVR

SEQ ID NO: 11395 - protein, 143 aa, Methanobrevibacter gottschalkii
MSIKLSANEIRFIALFESMTGAMVKDCIIDDEHGKVTFIVKKGDMGLAIGKGGSSVSKVQRAVDKSVEIIELDDDPIIFIKNVLSPAKLQSVKISQKQSGEKIAIVTADNTNKRIAIGKNGINIERAKLLANRQHNIDNIILK

SEQ ID NO: 11396 - protein, 98 aa, Methanobrevibacter gottschalkii
MDVDRGIRVAVDTGDVTLGSEKSIQSLKLGKGQLVVVAANAPKELIEDVEYYANLSEIPFVVYDGTSVDLGSVCGKPFTVATLIVNDPGDSTILDDLR

SEQ ID NO: 11397 - protein, 392 aa, Methanobrevibacter gottschalkii
MDEIITKIRGMITEINETENLGIDFADSYIKDLAEHYISKNLTDDELRKLIIKLKQAYDRAHVEAGEAVGTVAAQSVGEPGTQMTMRTFHYAGVTELNVTLGLPRLIEIVDAREKIKTPTMDIYFTEDKRDDEEFVRTLANKIGKSTINDILSDFNLNYGTMEVEAVLDNKKIEEKRLNREEIDAKILKTFKKATINGDNIVLSSNKTDSDFIIRELRLLADKFRDLQISGIKNIGRVIIRRDEEWIIHTEGSNLKEVLTMDGIDQVRTTTNNIHEIGQILGIEAARRSIINEAQKTLSEQGLSVDVRHIMLVADIMTSEGVVKSIGRHGISGEKSSVLARAAFEETGKHLLHASIRGEVDDLTGIIENIIIGQPIPLGTGSVGVKMDYKKE

SEQ ID NO: 11398 - protein, 1001 aa, Methanobrevibacter gottschalkii
MKAFIKKIQRINFGLMSPEDIRKMSVVTVEYPDTYGDDGFPIDKGLMDPHLGIIDPSLVCRTCGSKGGVCQGHFGSIELARPVIHVGFGDVIHKILRSTCNECGRTLLTDEEIEEYTQKILELKAQNESISSILKEIYDAAKKDGEECPHCGTIQDKIVLDKPVSIVQRIDPLFEFKKVFYETASSDSITIEEIGPMAREIVENKEELFQNKLLINSNLLERLCERLHDVDYIINILDLEDEDGSYEVNNTRLNNIFKTAISDNNLTEDYKLTASEVRERLERISDEDSFVLGVNPEVARPEWLVLTVLPVPPVTVRPSIILDTGERSEDDLTHKLVDILRINQRLLENMEAGAPQLIVEDLWELLQYHVTTYFDNEASGVPPARHRSGRPLKTLTQRLKGKEGRFRSNLSGKRVNFSARTVISPDPNISINEVGVPEMIAKEVTVPVHVNEWNMDEMRTYIENGPDVHPGANYVINGDRKRRVTDETKEYILETLEPGVIIERHLKDGDMVLFNRQPSLHRMSMMAHEVRVLPYKTFRLNLCVCPPYNADFDGDEMNMHVFQTDESRAEAKSLMRVQEHILSPRFGGPIIGAIHDHISGAYLLTRDGVEFSEEQALQIIRKSHLKIPEFKSNQWILKYDSNGNEDSFIYKEKGEKWTGKELFSLLLPNDLNLSYSAEISKCPVVYPPEDAEVVIKNGILIQGVIDESAYGSFSGKILDKIVKEYGPGRAKEFLDRSTDLAICGIMKTGITTSLNDEEIPEEAQDRINEHLQNKMDEVDKLVEAYEEGYLEALPGRSLEETLEMKIMQVLGEARDMSGQIAEHYLNMGKQYPDDPYDHVMAVENHSVVMARTGARASMLNLTQITACVGQQAVRGGRIERGYINRTLPHFKKGELGAKAKGFVHSSYKSGLDPIEFFFHAMGGREGLVDTAIRTAQSGYMQRRLVNALQDLQVKSTGLVTDNQGNVIQTMFGEDGVDPAKSDFGKPANLDKLIDEIRMEGK

SEQ ID NO: 11399 - protein, 741 aa, Methanobrevibacter gottschalkii
MLSEDYKKPETDEKKAFYYFGFERLAPFNEVDVIITQLKEKLGDDEEALEKINKHVEFIESYFDSDELKADDSLNVPFKKDKRRAKWESYKKDFPEIDLTEEVDTEDSIEPAEEETVEEAIVSDDEIETVGEQPNVFNKKHPQTKIYINGELLGYCDDPINFTQEMREKRRNGEISHEMNITYYADNQEIYIFNDPGRARRPLIIVKDGVPLLKEEHINKIANGKLNWDNLINDGLIEYLDAEEEENAYIAMNLADLSEDHTHLEIDPATMLGICAGIIPFSDHNSSPRNTMEAGMTKQALGLYVSNYALRTDTRAHLLHHPQTPIVKTRIIDSTNYDLRPSGQNFVVALMSYEGYNMEDAMVINKAALERGLARSSFFRAYDTSEKKYAGGQVDKFEVPDKNIKGYRSEEAYRNLDNDGVVNPESYVKSGDVLIGKTSPPRFLEENFGSVADRRRETSVTVRHGEKGIVDAVLLSETVEGSKLAKIRVRDTRQPEFGDKFASRHGQKGVIGLILSPEDVPFTEFGVVPDLIVNPHAIPSRMSIGQVLEMVAGKAGCLEGERVDATPFNQTLEDEIQQLLVDNGFESAGCESLYSGVTGERLDAEIFVGVAYYQKLHHMTTDKVYARSRGPVQVLTRQPTEGRAREGGLRFGEMERDCLIAHGAALTLKERLLDESDKYEAVVCENCGMLAVEDTSKHKKYCPICGDVETYPVEISYAFKLLLDELKSLCIFPKLVLGDKA

SEQ ID NO: 11400 - protein, 516 aa, Methanobrevibacter gottschalkii
MTVNNWKLVDAFFDKYDLVDHHIKSYNDFVNNRIQNIIDITDPISLDDGKYTLKTGKIRIEKPSNKEADGSRSIIDPTEARLRNLNYSADMYLEMALNEEGEDNPLEEVYIGELPVMLKSDICHLNGLSDEELIAKHEDPQDLGGYFIVNGSERAVVTMEEIAPNKIILERIGEVEERHAKAVVTSIKSGFRARITLEYKKPRKNKAFLRISFPYLPGEIPLVVLLRALGLSTDQEIITAISDDNNFQMMIADDIQVSAEELDKFIDQNVIKNGDKDEVKQHLQDAAIKYIGNRVAKNMPKDYRYKRAKDVINRYLLPHMGIEEERCYDKAIYLAEMTEMLLEVIEEKREPHDKDHYTNKRLRVSGDLMEDLFRVAFTNLTRDMSYQLERSLSRGKELSIKQAVRSDVLTENIKHAIATGNWVGGRAGVSQLLDRTSYMGTLSHLRRVVSPLTRSQPHFEARDLHPTQFGKICPNETPEGPNCGLVKNLALLCNISEGSDEQEIIDVIGQMDVELI

SEQ ID NO: 11401 - protein, 79 aa, Methanobrevibacter gottschalkii
MKSEFDIQKHMLVPKHEIMTDEEISNEFSNLDYSFKNLPKIKVDDPVAESIGAKPGDVLRITRESQTAGVFVTYRIVEE

SEQ ID NO: 11402 - protein, 288 aa, Methanobrevibacter gottschalkii
MTNNKIEILDKIEENLIKIREKNALTHCITNSVTINDCANAVLAIGGSPFMAEDAEELEEVVAIADVLVINIGKLSKNQIKAMEISCKKADETNTPIILDPVGVGVTELRNKITMNLIDNHNITAIRGNISEVKSIAKLSGVLDESNTAKGVDVNVDDIITKQNLKTNGELISTLASKLNTVILASGPIDILTDGKTTIAIDNGDDMMPLITGSGCMLSSVVGSCIGGSNPLEGSLIAILAMNIAGEKARAKVDEKDEGTGSFRTYLIDYLYKTNSESLINESNIMIL

SEQ ID NO: 11403 - protein, 206 aa, Methanobrevibacter gottschalkii
MKNIDLSLYLVTDKSEDIEKFLKTIEESIKGGVSIVQIREKTAETLDFYNLALKVKKITTKYNVPLIINDRIDVALAIDADGVHVGQSDMPCDVTRKLIGKDKILGVSASTISEAKKAQEDGADYIGTGAVFPTATKDDAPSITKQDLKKIVDAIDIPVVAIGGINHENASELIETGISGLSVVSAIMNAENPKKASEELLNVFNA

SEQ ID NO: 11404 - protein, 258 aa, Methanobrevibacter gottschalkii
MNKQRRMPVIFVGHGAPTNAIGDNIYIPEWKKVGEYLGKPNVIIAVSAHWYSEKLYVRTAKKNKQIHDMYGFPDELYQVKYEPKGSPRHAEKVLELLDIAEENNDWGIDHGVWSVLSNMYPEADVPVVMVSVNGNLTPVEQFEIGRKLEPLRHEGALVLGSGNIVHNLGMVDWRMNGGYKWAYAFDNDVKKAVLNGDFERIVNFRNIKFNEIAIPAPDHFYPFLNVLGAASKEDNVKIFNDVCELGSISMTSYIFEDI

SEQ ID NO: 11405 - protein, 96 aa, Methanobrevibacter gottschalkii
MLLYINFLTQVHFQFNNNINVQADIQEGKSESKLEDGDLTWIFTDENTKQVELNSKSLILAYRKGDYEGFKEFLNDVSLILAALRWCTPFNLTFLG

SEQ ID NO: 11406 - protein, 91 aa, Methanobrevibacter gottschalkii
MLKDDYQLTFQYGFFNPEYPSANAKKDFILDYDCKLIKVDSANSQFEVEEELKKMNKIIYDKSILKSNLMRILKKLLRKSIILIILKLKAD

SEQ ID NO: 11407 - protein, 404 aa, Methanobrevibacter gottschalkii
MAKFNTIDDFDVENKTVLVRVDINSPVDPGSGIILDDTRLKLHSKTIKELSKKGAKVVLLAHQSRPGKKDFTTLSQHADALSDILNLRVKYVDSLFSNVAKEAIRDLKPHEILLLENARFFSEESLSRTPVEQSKTLLVRHLSPLIDYFVNDAFAAAHRSQASLVGFTVNTPSAAGRVMEKELTVIQDALDNVQHPCVFLLGGMKPDDSIDVMENVLNNGTADAILTTGIVGNIVLWASGVDIGQVNKDFITNRGYEDMVEKSRVLIEKFGDKVKYPIDVACEIDGERVDIDIGEIPDESIFDIGVKTIAFYAKEIRDAKTIFANGPAGVFEDPKFAMGTEDLINAIANSDGFSIIGGGHIAAATAGLGCEDQMSHVSSGGGACISMLAGKKLAVVEALKNNKK

SEQ ID NO: 11408 - protein, 222 aa, Methanobrevibacter gottschalkii
MDTPIVILNYKTYLESSGIKALELANDLESAASESGITMVAVPQAADIYRVSQETSLPIFAQHVDSISPGGHTGSNLINTLIDAGISGTLINHSENRMKLADIAEVIKSCRDYEIESCVCTNNIETSKAVAALNPVAVAVEPPELIGTGIPVSQAQPEIVEDTVKEVKSINKKIKVLCGAGITTGDDMKSAMDLGADGVLLASGIIKAESPKDALLDLVSKL

SEQ ID NO: 11409 - protein, 292 aa, Methanobrevibacter gottschalkii
MVKKTQTASFGSVLRQSHNSRKFYNSKLYENLKIPENIDFKEFKIKKEDLNKLYCKSSENMDEIPDNSIHLMITSPPYNVGKEYDDDLTLDEYLELLTSVFAQTYKKLVSGGRACINIANIGRKPYIPLHAMVIEIMLNLGFLMRGEIIWDKSASAGGSCAWGSWMSASNPVLRDFHEYILIFSKESYSKNKSQEKKDTISHDEFIQWTKSIWTFPAVNAKKIGHPAPFPTELPHRLINLYSYEGDVVLDPFCGSGTTCIAATKNKRNYIGYDIEEKYIQLSKSRLSNQKFI

SEQ ID NO: 11410 - protein, 310 aa, Methanobrevibacter gottschalkii
MNNIVIYFLKLFICLIIIVVIMRLWSKNQEKIFFINSRKVAFPSQLFYKTDDGRYLAYWPKDYRGRKSTLQSRNSLIGKFTEEWVCKLFGRLIVDDDLYLVKQAIIPSLGITSRSPVDLVISTANRKILKASEVKVIFEVKMSIVWNWQYFDDSNNVVEIGDFRTHQGKPSFTRSDSILKAIGKCIGIRVSSFESSKIPIVVIGNAPLSNGFCKKADHLKRVGVIQGFWSLNPFPLNHGNTRKTTPYGGYIRFNNTSELKRNLDNLFSQDLNFFSGMENPKTLGKYIEIANNENNYEDKGLKFLKLIRRY

SEQ ID NO: 11411 - protein, 305 aa, Methanobrevibacter gottschalkii
MSFNENQIQKLEKSGYRFVGKHRHAAVKTCHWTRQSIVEKGVCYKEKFYGIQSHRCLQMSPAVPNCQQECEFCWRDLTHTQTEWEDNEYDDPKTIVDEAIEAQNNLLCGYYGNDKANKKKLEELKKPTNAAISLAGEPTLYPKIDELIGEFNHRDFTTFVVSNGQCVDRLRNLENDPYQLYLSLDAPNEKIFNEICRPRINDAWNNLNESLETLSSFNSRTCIRNTCVKGRNMEQPEKYAELIKKADPDYVEVKAYMCVGSSRDRLTLDNMPTFDEVKSFAKRIGDECGKELVNESEISRVVLLE

SEQ ID NO: 11412 - protein, 372 aa, Methanobrevibacter gottschalkii
MKFFENVAKQIFNKEGIPILEGHVAYSPEEAMSISSEMGVPVVIKAQVLTGGRGKVGGVKFANNPGEALKVADEILGMQIKGETVKHLLIEEKAEILNEFFVTVSIDRGARRPVIIASKEGGVEIENLAKTNPEKLIKYYPNPLIEFLPYEAREIARKMGVSSDLISPLGSIIWKLYNVFTKYDCDTAEINPLITTPNGLIAADAKMVVENDSLFRHQNLVKRLHYKRKAVDFVKLNGNIAVIGNGAGLTLTAMDMIKLNGGEPATFLDIGGGASEQVINQALNIVLNYEPVKVIFLNVLGGITKADDVARGVIKALKQSERHVPIVIRLTGTNEEEGQKLLEEAGIPYETSMEKAAKKAVDLCNELKQEMK

SEQ ID NO: 11413 - protein, 182 aa, Methanobrevibacter gottschalkii
MRTEIRICGFGGQGIILAGIILGKSACLFDGKEAVQTQSYGPEARGGASKCEVVISDTEVDYPKVQSPDILVAMSNEALIKYIVDLKDNGTLIVDPGTTDIEDVRDYIEEHNIKVYEAPATKTATDDIGLKIVANIVMVGSITKITGVISKEAAIKAIEVSVPKGTEKKNISAFEAGYALVE

SEQ ID NO: 11414 - protein, 287 aa, Methanobrevibacter gottschalkii
MNEGKQNRFLPYLRDDRLPHIFCPGCGNGAIINAFLAAMEKAEMDFDNIAMVSGIGCSSRIPGYLKCDSLHTTHGRALSFATGLKTANKNLDVVVFTGDGDAASIGGNHLIHAARRNINLTVICINNNIYGMTGGQISPTSPKGSFGTTAPYGNLDSPFKLAELVAAAGATYSARWTTVQIENLVTSIKDGLKNPGFSFIEVATQCPTYFGRKNKLKTPTAMAAVMKANTVFKSAADRMRPKELEGKIVVGEFANSQRSEFTENIEKLSVEKSGNKTSINSAYETEL

SEQ ID NO: 11415 - protein, 391 aa, Methanobrevibacter gottschalkii
MAIILTLILDSQKEKVGVKMAEEFFIQGNEACAKGALAAGCRFFAGYPITPSTEIAETLSRDLPKVGGSFVQMEDEIASAGAIIGASWGGAKAMTATSGPGISLMQENIGYAFMTETPIVFVNVQRGSPSTAQPTMAAQADMMQARWGSHGDYEPIALSPSSVQEFFDFTIKAFNLAEEYRVPVFVMADEIIGHMREKITVPENIEIVARKRPEKTDDYLPFENIENGTTPMPAFGDGFNVHVTGLTHDERGYPDTNTPETHEKLIKRICNKVLMNRDKICSVRSENCEDADIVIVSYGAPVRSVVEAVNKTDKKVGYIKIDTPWPFPDEQIKELTATASDVLVVEMNLGQMYYEVDRVVKDKNVHLLGKIGGALPTPDEILDEINKIGGN

SEQ ID NO: 11416 - protein, 90 aa, Methanobrevibacter gottschalkii
MIIIDENLCKGCHLCLFMCHENVYAISSEVNKKGVQLPFVKFEERCIKCGTCEIACPDQAITVDLPENWWMKDGNNINFNPRFTKGKSGC

SEQ ID NO: 11417 - protein, 163 aa, Methanobrevibacter gottschalkii
MKDLNTPITDEDLLNLNIGDQITISGTIYTGRDAALPQLVELIKEKKVPFDLNGSVIMHTAFSNAGIAPTTSSKVEIESTIPYLSENGIKIHIGKGMLSDETIKELDKNNSIFVITPPVAALLTSKVLDKKCVLFESEGMEAMFKLKVERIPGIVAIHNGLRI

SEQ ID NO: 11418 - protein, 244 aa, Methanobrevibacter gottschalkii
MAVDNGDFVRVNFTGKVKETDEVFDTTYDEIAQEAGLFDENKTYKPIPIVVGGNHLLPAIEEAIIGLEEGETKHIEVDSDNAFGPRDPKMVQLVPMKEFKKQGMTPFPGMRIQSEGSNGKILTVNGGRVKVDFNHELAGKDLVYDVEVTEIIADEEDKIKSMIELHYANPNVDIDKTEIDIVDGVANIKLDEMAKFDQKSYMDVTFARFRIAKDIWDNVEGITKVNFVDEFEKKEESDDEVEEE

SEQ ID NO: 11419 - protein, 364 aa, Methanobrevibacter gottschalkii
MKRRGVANLPLHGGHPPKWLFTRMVDLSGALASVIIEEYSLNEFLNRISNPYWFQAFSCVLGFDWHSSGTTTTTLGALKASLSPEEHGIYLSGGKGAKSRKTPQGIEHAGEIFNLKTETTEKLVETSKLSAKIDNSCIQDGYTLYQHDFFITEKGDWAVVQQGLNTYTKYARRYHWLGSEVEELLNDPHSGISCDKKTPDTLNMSSKDSANAQKVSVDLINDNPNHLRQYFKRKNSQMLLDDFTMPSHHPILDMDISDKEFEVLTRAYEIQPENYEELILLQGMGPKKIRALALISDLVYGEPASWKDPVKYSFTHGGKDGFPYPVDRDVYDNSIQTIRDALDQAHIKKDEKLKAIKRLDDFIL

SEQ ID NO: 11420 - protein, 179 aa, Methanobrevibacter gottschalkii
MNVNVLRLDHRLKRDTRITTHVCLTARAFGASKIYLSGERDAKLMENVRDTASRFGGNFEIEYSESYMGVIKKWKSDGGKVVHLTMYGSQAHEIAPEVREDGSDILIVVGGSKVPGSVYKAADWNVSVTTQPHSEVSSLAVFQHLLMNGKEFDLKFENPVLEVIPTAHGKNVNIHNENR

SEQ ID NO: 11421 - protein, 260 aa, Methanobrevibacter gottschalkii
MEDDSYFENEEFSPIKSLLGLLTFSTILPINVYTSIEYMTKLTWCWPFLHVLVGILAAVCGYVSFEVLHLNALFTAVIVYAFLMLITGYNHLDGVMDMADGVMVHGDPERKISVMKDSSVGAGGVATLFLVASLTIAGLYNILDYYFILGIIVCEMAAKTSLITTALLSKPLIPGIGSYFIKETTIVNYLVSTILVICIAFLLGNLIGVVGVLGAIVGGIIIATISKRNFILANGDVLGMSNETGRLFALLFMAIALYFI

SEQ ID NO: 11422 - protein, 704 aa, Methanobrevibacter gottschalkii
MTTEFIIRMDDMPKIIHNDLSDSLDVESILKKDYKYIYEAIQNEGFIIENNSGDLFKEILFDSKVVGFAFYELNALTSFVLNEVYILPEFRGNSLFLLEINVLLSAGNTLSILQPTKNLVEILIHYGFASKLSENIVASAIGFDFKSENILSNSSEEFDNDDQILSSNIYDLDIRSCLFLKDISTPGKNIIYYHEELKNDFKEYGERKSLNKNYFNEIKDLFLQNSDEFTQILFDLKEELPKSQLGFDVVIGNDDGFSEYMQDIIDDGIISEDKAKKINNILKEEYERGEVTDDGIITRLNFFINDLDSQIDPFNIFEIGANLCPYCCNFINLTDESCPICGYNLFYENDFDFEDDDNFEDGIFINKDNVLSVMSGLYERFGRKYKLEDINYGKQYPTSYDLDQYRILKFIDEYHNLEVAFYFLNNLKLPQEIFNDLLFEEEYVTYEITEETWSDFANYSLTVNDLKDILRDNGLRVSGRKQELIDRIGKSDISVSEFSSDKLFLTRKGKDYLNEYSWIGLYNEFLKNFDFDDFYRFYESNDGNFNEIVSKYLDEHIKIAKNNKDFDYLINCFSSKAIFSGLDKNPNDALKWEMRRFCLTINPIYSRGVYHDFYLHLNSENINNLRSLKDEFSSEEMLDSFEESWDYFEFNKSIVSKKDAKIIFERLLINNEDLKLINMELKDRYSGRDAIDNTFSADLNDYFK

SEQ ID NO: 11423 - protein, 360 aa, Methanobrevibacter gottschalkii
MELNITKKDYGICINNPNHFLALSDFTVSDGIDIVENVNVVKAKDEFKATAKKAEAFNQSKGSYIAQASDSIDYFQNNYDDLTIFTFMANDVVIEDFTEYLKVANSPKGFFDARINLSHIIYIDSVVSPKDLLKIFKIVTNTKAKVLANMCLPAHIQNIINTNDFLAVLSNINVSESQDLDINNAEYEEIDWDDLKIKMEDAVEISLEDAFSYLELTFGILDYLVSEGILIGDLVDTGMELANGVKITQELRDKMETQILKSLTDINVVSLIIAGMRMEQDLTGNHIREFDVHDDSDYLYTDEVLGLAISNQIAGTKATFNFKRYHEAKPGIIAGLPPILDDIFAGLIAGCMSKIFEELL

SEQ ID NO: 11424 - protein, 389 aa, Methanobrevibacter gottschalkii
MAIIIDPQVSGIAGNMLIGAFVDLGADANKLKEVMEKSAECFGKVEVTFKKINKKGISSTYCHVEMLEHKHSICYPKFIEKIKKLDLDKKVKETSIKVFERIAIAESKIHGKTLDSVHFHEVGASDAVADVIGSIYAYYSLNLDNQKIIGLPIAVGGGRVETAHGIIPVPAPAVVEVLKNAKMIGGPVDSELATPTGAAVYMEICDEIKEFIPLIKAKKTGYGAGKKDFDHPNVLRIIESSDIAESDKIDVIETNMDHLTGEEIGYLFDKLLDIGARDVSVTPIIMKKNRPGNLLKVISRKENREKVIEAIFKETGSLGIRIAPNMHRGISKREFSKQIFNINDKDYEVTFKIGYLNGEIISKRPEYEDLKKIAQDSGLPLKKISEMIR

SEQ ID NO: 11425 - protein, 225 aa, Methanobrevibacter gottschalkii
MKKAISIFSGGLDCTVATSVFSKSHKIHAITFNYGQKAFKRELKASKEICKKMDWTHEVIDLPWLANISNSSLNTNEKIPELSAEDLDNLKISQESASSVWVPARNTVFTSIALSYAESIGASSIIVGWNGEEGATFPDNSKGYMKKFNELIKEGSPENIRIEAPLIDLDKEEIVKLGVEYDAPMELSYSCYKGKKKQCGICESCMRRKRAFKNLGIKDKSEYEN

SEQ ID NO: 11426 - protein, 332 aa, Methanobrevibacter gottschalkii
MAKEDRSEINPFTGRKHYDKINDDKFLKESYKEYYSMIDQVQLLDNTQNGQIVINVALNLINAVNSYLSEIGRLDYVEDYYDWDVHLVGDNAVNAFCMPGGKIVMFSGILSVANTEEKIAFILGHEMAHALLDHARTRISAQNTQNAITSAAWIGSIAMDFFGLGELGSLTRAATNVASIGSQFLLMNSWGRDQELEADRLGMMIIHWAGYDVSRIPAFWRDMSMQNSNEHDFFSTHPADSKRIATMQQLIVEIANDNDFYSKPVIGDVNQTNVKSVSSEGGFCSNCGNPVDIDAKFCTSSGTKLDVGLRCPNCGSAVGNNDVFCINCGFKL

SEQ ID NO: 11427 - protein, 332 aa, Methanobrevibacter gottschalkii
MKDIFDNVQFGDLKLNSRIVRTGTWETETSEGGFLTPDIYDRYEKIASSGTGLIVSEMFALDHKDRFYPYSTNMNYRGFIKDYQMVTDIAHKYDVPIFGQLAFFYYDDGENQKVEANDIAQEGIRKLQAEVIMAAKKFSFAGFDGIQINMGNNFYLSRFMNPYFNQRDDKYGGNTENRVRISAEIIKVIKKTMDIHVSCRINPWDARKDGMTADESIAIAKELEKAGADSIQLTARTISQIYDKGEKHPFLVYVEKLIDAVDIPVVLGGSLRDMKTINDVLNSSTVEYISMSKPFVAQADFLADWKANGEGVSVCQSCNNCYSKKTSTCFKF

SEQ ID NO: 11428 - protein, 71 aa, Methanobrevibacter gottschalkii
MVNPIIAAIISFFLPGIGQIIQGADVKKGIIMFVIAIILGWLLVNFLGSLGNIIYCIYALYAAYDAYKIEA

SEQ ID NO: 11429 - protein, 571 aa, Methanobrevibacter gottschalkii
MMAKVRFTETALRDAHQSLLATRMRTRDMIPVAKEMDKVGYFSVEAWGGATFDTCIRYLNEDPWERLRQLKSEFKKTPIQMLLRGQNLVGYKHYPDDIVTKFVEKSYENGVDIFRVFDALNDVRNMEKAITVAKDQGAHVQGTISYTISPVHTIDGFVDLAKHLEALDCDSVAVKDMAGLITPAAAYELVSKLKEETDLLVDLHCHCTSGMTPISYYAACQAGVDILDTAISPLAWGTSQPPTESMVAALQGTEFDTGLDLKLLASIKEYFEDIKEKYLGILDPISTSIDADVLLYQIPGGMLSNLISQLKEQNALDRYNDVLDEMPRVRKDMGYPPLVTPTSQIVGIQSVMNVLGGERYKTVSNEVKDYMKGMYGKPPAPVDEKLSKKILGDEEIISCRPADLLEPEFDKIKADGKEKGFVKSDEDALTYALYPPIAPKFLKGETVEEELKAPHAFSEDEAIGIPTQYNVEVDGDMYEVKIMPTGFMEIEEADNGNFHPVEGGVTSSMNGMVIKLKVNVGDKVTKGSTICVIEAMKMENDIQSEVDGVVEEIFVEPGDAVNAGDTLMVIK

SEQ ID NO: 11430 - protein, 364 aa, Methanobrevibacter gottschalkii
MNKIKIAIVGIGNCASSLIQGIHYYDGKNPEDAIGLMHWDIGGYEPSDIEVVAAFDVDARKVGKTIDEAIFAKPNCTTVFQEDIPKYDAKVSMGHVLDGVAEHMSNYDDEYTFVVSDEDPVDVVEVLKESGAEILVNYLPVGSEKAARYYAQCALDAGVAYVNCMPVFIVSDDEWDVKFKAKGIPIVGDDIKAQIGATITHRTLASLFMDRGVKLDKTYQINTGGNTDFLNMLNRERLDSKKESKTEAVQSVLKERMDDRDIHIGPSDYVPWQNDNKLCFLRMEGRTFGDVPMNIELRLSVEDSPNSAGCVIDAVRCCKIGLERGIGGQLTSISSYTMKHPPIQYTDDEAFENVEKFISGDLER

SEQ ID NO: 11431 - protein, 281 aa, Methanobrevibacter gottschalkii
MNPYIEILRPGNALMGAISIILVALIDKTISIPVILAMIAVFFETSAGNVINDYFDYKIDLINKPERPIPSGRISLKNGRNYGYSLFAAGTVCGFLISYITNNWIPFGIVLFADIILYLYAYTLKTTPLIGNLTVGFMTGFGFVFGGFSINNPNIIITSLFLGFFAFVMTTAREIVKDIEDIEGDKTDGAKTLPILIGEKKPAILAAILIIIDSALCPLLYYYHIFGILYLVVIAFAVMLFIYSAILILKSQKREIAAKVSKNLKIGMLIAFVAFIFGSLI

SEQ ID NO: 11432 - protein, 525 aa, Methanobrevibacter gottschalkii
MFKEFNINRKDKYYLIAILIFSAILVGYYINFNNAIGISCSDVYIYLINSLYYTGEKVNITNFIHISPVVCFLTSLFFRVGFVDKLAIYVVTGFFAIIGNIGFYLLLKKFFNEELSLTGTILYSSFSLYLIWLANGTLDIPATGVIIWIALFTMIAVRENPKYYQYLIPLMVIGLYTRYTVILTLPAFFLFYVLENGFKIKPEDWKYIKRGIIIATIIAITVFLIVFTMGNGRFDAASQMANGVKGTNGELTDPAYNPDSSYYFMNYINYISNSHTVFEINPTLYSPTILAYAIYALLFIGAGFWLYDHKKVNFRKTDAISIIIILMGIISFTRVTSVITSILIYIGIYLLARDREYNDGVFMLGWILANAIFLSFNIVKVNRYIIPTFPPFIFFVLTAIETIHAHVKINKNMIPLALIVLFVIQAFAFTATVEPTDKYMSPEEISNYIIDSNPDYENMTIGVYNIRPYSWWVGSNTIGIPSSHQSEIEQSNISYYIVNKPMDNLTNFTEIKNINELYLYKNNNF

SEQ ID NO: 11433 - protein, 524 aa, Methanobrevibacter gottschalkii
MFNEFNINKKDKIYLIAILIFSAILVGYYINFNNAIGISCSDVYVYLLNALYYTGTNVHSIDNIFLSPVVCFLTSLFFRAGFVDKLAIYVVTGFFAIIGNIGFYLLLKKFFNEELSLTGTILYSSFSLYLIWLANGTLDIPATGVIIWIALFTMIAVRENPKYYQYLIPLMVIGLYTRYTVILTLPAFFLFYVLENGFKIKPEDWKYIKRGIIIATIIAITVFLRVYGMGNGQFEAGSQIANGVKGTNGELTDPAYNPDISYYLTNFPNFISNSHTIFESNPVLEYPTPLSFAVFALLFIGIGFWLYDNKLKAEKRDVIPVILILIGIISFTRVTSVATTLLILIAFYLIGKNSEHKNELFMLIWILANAIFFSYHIIKVNRYILPIVPPFIFFILLAINTIPEHININKNVIPIVLIALFAIQAFAFTATVEPTNKYLATEEISNYIIDSNPDYENMTIGVYNIRPYSWWIGPNTIILHADAPGEIDQSNVSYYISQSRIDNLKNFTEVKNSGGLHLYENNNF

SEQ ID NO: 11434 - protein, 514 aa, Methanobrevibacter gottschalkii
MKVVCCKNCGAKYQLDDDDDISTFECSSCAGDLEYLENYSNGKESNQSFVSSTKYNDSYIVQCQECGLKYKIKSSDSILDYECDSCGGSLRYLDDEMNKELDSYLEERHAELQNIRKESKPKEPTSEEINTEDNTPSIKSITDKLENFFSEEHMLQIADIEKKEEEEIQEQVISKTARTTIPQSVLSRFGKEFATPKTEDYDILKNFLKTEFFKGMDEYYPKDNKLKSNKSFLDKISLKEPDNGESKPVKSSIINNNSKFNLENFNVENIESNNTIIIIGVVIFILSIIEVLTINSGIGIIALFIGVIILCYGIYKTRDVKQDEERTRIIREHLLSLPEEFYVFYNVKIPTSTSGINHVVVGPTGIYALLSQKYNPKLRLESENENLNLIGSSESEENKLEEFSSYGNMRKFRYTTKQAKFSQDNKVKQKALSLGEDLINFLNENNIKNCFVEPLVGFINNEVVVINMPLTDEDLFIEELLNKIQNTTIKLDSETIDKCAVLINKYSADCSSEF

SEQ ID NO: 11435 - protein, 333 aa, Methanobrevibacter gottschalkii
MKLFNKYPFLIGEISFNYYDLAKKEELSYFRVAKLLIEKCSECGINGVNFHVGDSEYLHCKYEEDSNQTDQLSFDEYKELAEYCKKLGLVFIITPANIEIVDKLNDVVDVYKISSSDLTNLPLIDYISNKHKPILLSTAASNLREIKSAVKCIEDNSNFKIIIMHSVLSYPTKLEDANLLMIKDLSEQFKDYDVGYSDYTVSDNFMFILTTAYQYGAVVLEKYFTLDKSFEGHEFAMDEEDARIVRLSANVLSKINGYKNKQPLICESFSKRNVRKSIVAKRDIKSGEIIDNSNIDFKRPGVGISPSKVDDIIGKNANRDISKGSLIEYDMLS

SEQ ID NO: 11436 - protein, 554 aa, Methanobrevibacter gottschalkii
MFNNNKILVVIPAKGVSKGIPRKYVRLLNNKPLIYYAINIAKSSQYVDDVVVTTDDSEIASISEKFGVSVIRRSKELSGEDIPLDAVVFNAMVQKEKSAFDEYDIVITMLPTSPLLKTQTLDNAIENFDDFSLESVISVVEDKQLFWGYDDDNKIYFPKYIERCNRKDLPSSFRETGAIIATRRGFINEISCIGENIDVIELSDEEAITVDDFKDWWIVETILQRKRIGIVVNANNEIGTRRIDNCLAFASKLVSHEFLFILDEKHKLGQNLVEKFGFNFKIYNGHDAIYNILEEFAPQIIINDVSDTTEEYMSDLKERGYFVANFDDLGVGSNLADVVFDSLYEHDLSDTNVYTGQKFHILKDEFYFQPHKVITQDVDNILIMVDGNDPKHLSEKFLEAILSTTYEMKINIIVGRGYENIEQFISNYESNPLVQIYQNVPNVSDFMFKADILVTSASKIMYDACALGVPTICVYQNDLETSHVFANSANGILNLGDVESLTKQEFVNQFLELVNNHDLRLNMHNKMKSIDLQHGYENICAVVTEEYRKFAMNK

SEQ ID NO: 11437 - protein, 349 aa, Methanobrevibacter gottschalkii
MNMKSMSDKLLKKINELSTPVKIMHVCGSHEHTIMENGIRSLLPDEIEIIAGPGCPVCVVPSREIDEALELIDRGVTITTFGDMLRVPGSERSLADAKAEGGDVRVVYGINRAIEISEKEDNDVAFISAGFETTAPTTAAELLATPPENFSVLSCHRLIPPAIDFLINSGETSLNALIEPGHVCTIIGTRPFEYFSKEFGIPQAVAGFNPLDILMSVYMILRQIHNETPKIENEYTRAVREEGNTIAQEKMNQVFEVTSREWRGFPKIPNSILEIKDEFSEYNAREKYDIEVKDVNEAPKGCICGPILRGLARPEDCKLFRKTCNPLHPIGACMVSKEGTCNIAHRYSR

SEQ ID NO: 11438 - protein, 234 aa, Methanobrevibacter gottschalkii
MTIEAIAVDIDGTITDEKRQICISAIEALRKAESKGIPTIIVTGNVVNYAYATEVLIGCSGGLVAENGGVVFKEGENNNAVETLVERAFVTSAEEHLKDKLGDKFDKHASHDNMYRLTETVFYKTLDIKELEDALKDFKYLDELEIYDSGFALHITDKRVNKGTSLKYLCERNGINMENVMAIGDSQNDEDFLKQAGYKIAVANAEDKLKDISTYTCENMFGDGVAEAIEKFVL

SEQ ID NO: 11439 - protein, 437 aa, Methanobrevibacter gottschalkii
MIYEIAQEAKKAIENNCDAYEIYIDESKSIQLDSRKEELNFAKEEIDRGVGIRVIKDNKIGFAFTSNMDKIAETAKHSIENTKLNKTDENYAFAEVEEIPSVKKVYDKKFNELDLDESIEFLKNTIDTTIDQGCDITGSGFSASEGKSLILNSNGVSIEDEGTGFSIGLSVNIQKDGKIATAYNSQSSRFFDLDGEKLAIEVCNLAKSSLDTKPIETNNYDVVLDYYAATGLLQTFMNAFNGENVMRGRSILKDKINFQIANPNLSIIDNPLLEKGMYTSKCDGEGIVSQKTDLIKDGILNSFIYDIYTANKSGVKTTSNGLRGSYLTTPMISPTNLEFKFSDMKDLSEIKNGVLTTSVLGAHTANPISGDFSVEASNAFKIENGELSEPINKAMISGNIFEIMEKVEGLQSEIKQYGPFIIPKLLVHDLRVVGQNQ

SEQ ID NO: 11440 - protein, 83 aa, Methanobrevibacter gottschalkii
MPKNEEFDLDKEIERISRKTNINMRNSEFSFENQIRKLDKEIDKIMEDKLKEFDDNKKLTSDYFSIDYNESTISRYREKLKKI

SEQ ID NO: 11441 - protein, 153 aa, Methanobrevibacter gottschalkii
MESEVKVIPEQKLAVINCKTPITDLEIFLSMLMGWVDAEEIETAGEPFIVYFSPRHQVNKGDAVFDVSIPIKEDANETDRIRVVDMISNKVLSGIHYGSADSIMETYEKLVDIAQENHYDIIGSPKEVLIKNVHNCDDEKEYITEIQLPIIEM

SEQ ID NO: 11442 - protein, 407 aa, Methanobrevibacter gottschalkii
MGTEFLKIKECDEATEIIQKLFDEKLNQQSEEILVTESYGRILFEDVYSKMDFPPFDKALKDGFAILAEDSFGASEESPKTLDVIDFLEAGATTDKKVEKGKCIEISTGAAMPEGAESVVMVEYAEKSDGKVNLLTTATPTQDVARKGSDIEEGKLILKKGDFLNPGKIGVLLSQGFETIEVYKKPILGVISSGNEISLQGEGLTYGKIYDVNGGMIKNAAISCGADAHFLGIMRDNYDEVKHKITDALKEADIIICSGGTSAGLGDVLNSVLEELGEVYIHGISVQPGKPTIIGVIEDKLVIGLPGNPVSALMIFNAFIAEPLTKLAGIDKDFELDTVKGKMTRRIHSPVGRMQYQLVKVDGKDIHPIFKDSGAIFSLSTADGYVKVPKSVELLDEGEEVEVYLFN

SEQ ID NO: 11443 - protein, 101 aa, Methanobrevibacter gottschalkii
MSKPNQNQQQEYRRVRTPKKGEIPGVVEQIMGHGKLKVRCADGNMRMTRIPGKMKKRIWIREGDVILVKPWDFQSDEKADVIWRYTKTESNWLERKGYLKM

SEQ ID NO: 11444 - protein, 256 aa, Methanobrevibacter gottschalkii
MDSKIAKADAKHEKLHSQKRKKDSSDRKVGNEIFDKITLETLYKLANQGHIDILNGAISTGKEANVLTGITDDGKFIAVKVYRIATSDFKKMDYYLKGDPRFNLKTKNKRKIIYSWVTKEFKNLTRLESAGVKVPHPITSANNVLLIEFIGDENGNPAQPVKNQPPKNSEEFFKKLLINLKLFVNEAKLVHGDLSNYNILNKDEEPVIIDVSQSVVLDNPISRELLERDINTLVREYTKLGVKTSFEEIWEYVNPR

SEQ ID NO: 11445 - protein, 82 aa, Methanobrevibacter gottschalkii
METPPCKSKINRIPKPPSAKICVKHSQKKKHMTGMTKFYRSYDFEIQKLPMINENTMQKPQQIYFKDLPDKEIIKEDVILFF

SEQ ID NO: 11446 - protein, 438 aa, Methanobrevibacter gottschalkii
MGEKYKKVINMKKYLPRYTDQELKESLEYMGAVLITGPKWCGKTTTAKQQCKSLKELQHPVHGKSYLKLADTNPIELLKGEKPMLIDEWQMAPELWGTVRYLVDESDEDGLYILTGSTIVDESKIVHSGAGRIKRIVMRPMSLYESGESTGEISLIDLFDNDDLNIDGVTSNLTIPDLIFAACRGGWPESLNKKTKKQQLAIVSNYIDIICNSDVSEVDGVKRSPQRVKTILKSYARNISTLATKKTLMKDIKTEYADISLPTFNSYIDALERLYVIQNIPAWSPNIRSANTIRKSYKKEFIDPSIAVASLNLTPEKLLKDFETFGFIFENLCIRDLLVYSSSVNGKVLYYNDDSGLEADCVIYLNDGRYALIEFKLGNREIDNGAGNLLKLKDLIKKSVENKKIDLEEPSFLAVITGGELAYTRADGVKVIPIGCLR

SEQ ID NO: 11447 - protein, 312 aa, Methanobrevibacter gottschalkii
MFKFDKEQEVFDFAGVKMGGQPGEYPTVLAGTIFYGGHNILNDELTGDFDKDKAETLVNDMASISDVTGNPYIVQVFGQTVEALPKYIEYIGEICDAPFLIDSTSGDARVAGAQYADEVGLTERAIYNSINMAADKSELDALASTDISASIILGFNPMNATVEGKMNMWENGDDGAYEKGLLEVAADCGIDKFMMDTAVTPLGQGAGIAARTSFAEKAKWGYPVGSGIHNVPSAWDWLRDYKKEGNKTAFTVCDIGANIVQVMCGGDFVLFGPIENAKIAFPAVAQTDMFISEAAKPLGTEPVDYHPMNKLL

SEQ ID NO: 11448 - protein, 206 aa, Methanobrevibacter gottschalkii
MPETDYLKIPQNRIGALIGSNGGVKKSIEKATGTILDIDSDEGTVYITPGENMEDPLGVWNANHIVKAVARGFNPEVALKLVSDDYYLEVISLPLYIGKSKKALARHKGRIIGKDGKTREIIMEMAEVNMAIYGKTVSLIGEMDNIMVAKEAIEMILKGSRHKSVYGFLEHKKEDLKMKEFKDLVGIEDDKIEFKDGIEFDEKTLQ

SEQ ID NO: 11449 - protein, 567 aa, Methanobrevibacter gottschalkii
MQEQDVGTDWRNDFKNLTPSEFFRKNKQMLGFTGKIRSLTIVFHELITNSFDAAEEAGILPEIDIELKRVEKEHYILKLKDNGPGIPEDYVMRVYCSMFAGSKFRNIQSRGQQGLGCSGCVLLSQMTTGKPARVISCYKENGDIKGVKMKFQMDVKNNRGILMEREDYPAESTGVCIELQFKEVSYSLAEQGAFEYIRRTMIGNPHAKITFRDPSGHKYIFKRAADIVPILPKEVLPHPKGVSADDLMTMAQNTDSRRYKSMLTSSLSRMSNKRVDEISELTGIDMNKRPKDLTFPEAETIVHCFKKMKFMAPPTDGLIPIGSEQIEKGMKQILKPEFVTTITRKPVTYQGGVSFIIEAGLAYGGDSGRVVKEQRKSEIMRFANRVPLTFDAGSCAITEALKSIDWKRYGLKDLDNTPLTLFVNIISTQVPYLSTGKQSVSPEPEIVHEIRQSTMKLARKLQKHLRAKKAAKEKEKRSKVFEDYMPVIIEEAAKLGETGVPEYQEVLAKVTKRALAELLGEKVEEEEEEEELDAIIMEEVDERGYAVDGNSTLDSFEEDDVDDEFED

SEQ ID NO: 11450 - protein, 364 aa, Methanobrevibacter gottschalkii
MTEIKENQKAHREKRKEYTYNKLKGLGQEIIEDIEKQKVPSVKVPSRGTGNIVYDNAKRYYVLGDRYGRRSLGNVKQIRKLGQMVYVANFCKDLVAREKTATIREMYYVSEGWGISFKTQQESNIVGEDLEVTLGTTREDLGLMPEEDGASVYGDITLLDDGVEINAAKAGKSGYTISPTIDQVEFLDCGVERVIAVETMGMFHRMVQENANKRFNTLIVGLKGQAARATRRFIKRVNEEIGLPVYICNDGDPWGFHIAQVIISGSAKLAHVNHDLATPDAKFMGVTASDIINYDLPTDKLKDVDVMRLKELSKDPRYKSDFWQTEIKKMLKIGKKAEQQSFSKYGLEYVVDTYFPQKLEELEN

SEQ ID NO: 11451 - protein, 90 aa, Methanobrevibacter gottschalkii
MKQCMDTENLHRRLKKIIGQLNAIDRMIEEDIPCEQILMQVNASKSALHKVGHIIVEGHLEHCVKQAMEEDDVDEALVDISSILEYYSRL

SEQ ID NO: 11452 - protein, 622 aa, Methanobrevibacter gottschalkii
MNLKFKNEEKLEIIFIIVSSISLVLGFLLSIDYLSWISIIICGIPIFKECIEGLITEFDIKADLLVSIAIIASIIIGEIFAAGEIATIMAIGGFLEEYTVAKAQNQIKELAKMTPKTATRIKNGTEEKVPIEEVKIGDILKILPGESIPNDGIIINGETSINQATLTGESIPVDKTRNDEVYSGTINLYGSFTMKTTKISEDSSLQKLIKLVESSKPENANIVRAADKWATMIVVIAFTAAILTYLFTFEITRSVTILVVFCPCALVLATPTALMAAVSNLTKYGILVKNGESLEELAHIDEVIFDKTGTLTYGNPTVIRVISENPQEMMYLAASLESKSEHPLAKAIVKYYNNNDLAAVNEFKIHIGKGITGYINGVQIIAGNKKFLESKNIPLGSNENSSNGEIEIFVAKGNKIIGKIFLADTIRSNAKATIKNLKKLRIKTTLLTGDNENTAKSIANQVRIHNIKFNCLPEDKIQYIKDEQIRNHRVAMIGDGINDAPSLRKSNVGISMGNIGSDLSIESSNITLIKDNIENIPHLIEVSKKTIKTINISIGFALTLNIIAMALAILGILNPIEGALIHNIGSVIVIIYSSILVNYKSSKIDYRTQQFDVNKALNITMF

SEQ ID NO: 11453 - protein, 67 aa, Methanobrevibacter gottschalkii
MAEKEIKVVGMHCSSCVNAVELCLKDVDGIDDAKADLDSGITTLTLSGNVSDEDINEAVKEAGFEVE

SEQ ID NO: 11454 - protein, 338 aa, Methanobrevibacter gottschalkii
MKTVAINGYGTIGKRVADAVAAQDDMKVIGVSKTRPNYEARTAVEEKGYPLYIGIPEREQMFKDAEIEISGTVEDMIQEADIVVDCTPGTIGPQNLEMYKKAGVKAIYQGGEDHDLTGLSFNAMSNYDESYGADYTRVVSCNTTGLTRTLSTIDPIANIKKVRAVMVRRGSDPSEIKKGPINAIVPNPPKVPSHHGPDVKTVMKDIDVTTMALLVPTTLMHQHNIMVEINNEVETEDIVESLEKRSRVMVVSAEDGLGSTAELMEYAKELGRNRNDLYEIPVWRESINVVGNELFYMQAVHQESDVVPENIDAIRALLEMESDNEKSIAKTNKAMGIL

SEQ ID NO: 11455 - protein, 277 aa, Methanobrevibacter gottschalkii
MKQKVIFGPAGSPVDYKGAAYKAPKYISEEGLDSYEYQSPYGVRIGESSASTLKEESEKHDVLISMHAPYYINLCAKEESKLDKSIDHLIAAARAGEWMGAYRLVFHPGAYLNRKPEKAMEISRNTINRLFEELESEGIEEFTFAPETTGKRTQLGNIREVVELCASFDHFEPTIDFAHIHARGRGFLNKKEDYNCIFSTIENQLNIDILHCHFTTIEYGKGGEIKHHTLDENDYGPNIDDLLSNLIDNGWNANIICETPLRDIDSLKMKKKYEEMI

SEQ ID NO: 11456 - protein, 169 aa, Methanobrevibacter gottschalkii
MTINDNHNHFCIYCGAKLDFGQHFCTKCGKEVVHAEPTYEIVSRYYDLLYDIEQEYDAKQERAKELVNKLFDPAHMSYNKFLSSINKSNGLFNNQLDVAKRMIEVYDGTKDFIEHEIDNKIRTLQTFVDKMNDLIDEMVIHLSSNKQDTGDINNLFEDMDDLIDSVKDY

SEQ ID NO: 11457 - protein, 355 aa, Methanobrevibacter gottschalkii
MSFRTRRILIMTPFYMIFQFFLLKYLLLLFGGLDDGYLIIIAIIVGLLHCMPMFFESKKSTVAGRFLTTIGGVWMWMSLMFLFDLMFIYLIKMFVILPFEIIVDLVLIVPFLGIYNFYKSHKLVINEKILELNNLSRDINIVHLSDVHFGSVRHKKIINLLVNKLKELEDTCELAIISGDLADGSSAVGTDDFLAFKDVDMPIIFTPGNHDFYPGIDNVINACKNAGIIVLDNEKKEFGDLSIFGLTFSFEDRCVPKIDESWINPNLINIINYHVPYYWDEFSKLGFDIQLSGHTHGGQFYPAIWFANILFKYNKGLFKNNLGKYLHVTTGVGSMDTPMRWGTDSEIVILKLKKA

SEQ ID NO: 11458 - protein, 374 aa, Methanobrevibacter gottschalkii
MKNDNKKAEIKTTNQKQKLKKAESKECAECVILKPVGYPFEFNLMDEHIEITNKKLFEEYAREQWLGLVVKENSHLFDQKIIPDYGFEVIKAKPNNSIISETTRIQLITSDLENKNDKLTFKSNISISDIVGQTNAKNKVKVIMKYLEHPGKFGPWAPKNILFYGLPGTGKTMLVKALANELEVPLYLIKATSLIGDHVGDGASKIHDLFKKASENSPSIIFIDEMDAVALHRSFQSLRGDVSEIVNSFLTEMDGISENEHVITIGATNSPNSLDYAIRSRFEEEIEFKLPDDEERLTILKNNLKSMPLDYELDLEKIVKLTKGLSGRDIKEKILKTALHNAIANDSDSITMKNIDYSIESSKIKNKDIKGMFE

SEQ ID NO: 11459 - protein, 396 aa, Methanobrevibacter gottschalkii
MILNLRVDHKIADIQSMEVIAKDIDDLFAELQEKYSIGEYIEISTCNRKEYYIHNNNIPEDDELLSHENVSIVIDYGQSAVMHLLRLTSGLESMIIGEDQILGQVKDAKNNAIKNHHCGKVLDTIFTKAIHVGQVVRNKTRINKGSVSIGSAAIDLAEKHIGSLVDKSVLVIGAGKMGKLVAKALAEKDLKAIFVANRTYYVAVNLAEDLGGEAILFNDLEKYLTTADLVISATSAPHPVITKDRLLKCGRNYETLMMVDIANPRDISEDVCELGVKSFNIDDLREIAEINTNLRRKEFVEAESIINEEFILLKESFKIMEFDKLLGNLRASMEDIRQRETQKANVKLAVDGSVKILDNLTNSIVNKIFYDISKKVKKAAKDENEDILAACEYIFN

SEQ ID NO: 11460 - protein, 206 aa, Methanobrevibacter gottschalkii
MDWTSLYLKTFDFNVFILGTGEVATRRANKFLDHGANVKLVGDSLPKELKYKGASLCSVSDVDDLIDWSDLVVIASGDRELSDYVSGIAKNKLINRADFPQEGNVIVPTSFNIGEIEISIFTGGKSPLMARQLRKKIQSIITEEDILEIELQDYARKNLKKLVENQKDRKKYLYEIFEDEKVNVLIKNRKIDEAKLYIDNLIRGLI

SEQ ID NO: 11461 - protein, 160 aa, Methanobrevibacter gottschalkii
MTWEDAPSHICRGGDIRGLAFCCPPVKPCPILNALQEVNLTPKEYIEIKTQFAKETRLGEGAGTCFGSLVWCCKPSKPCPLRDMTLKNMGMSHDEYLDLKKELSERLVGVKKPDPDEKAEALAETFNVTKLEAMNILNECNDDLRAAVKVLHARSLENSD

SEQ ID NO: 11462 - protein, 228 aa, Methanobrevibacter gottschalkii
MKEKLIVEDITITLERKNIKNMYLRVLPPKGDVKLSVPLFLPNNEVIMFIKSRKNWILKKQEFILNNNIQPPLKFISGEKHQLWGREYTLQLIKNDNIEHVLIDEDTSIMYLPLPKKSTIKAREEILIDFYRKELQNAIPQVLEKCSLIVGQKPSEVKVRKMKNWGNCRQDRRITLNLNLAKKDPKCLEYVMIHELCHLIEFNHGEKFKKLIDKFCPDWKKIKKELNE

SEQ ID NO: 11463 - protein, 533 aa, Methanobrevibacter gottschalkii
MDFITLKNITKTFDGVDVLKNINLKINEGETLGILGRSGSGKSVLINMLRGTSDYKPDAGQILVNVAVCPDCLAVDSPSHVGEKCSCGATLEAKEVDFFNSERKLFASIKRRISIMLQRNFALYDEETVIENVMRAMPEGKDYDEKIYEALELLEMVQMNHRITHIARDLSGGEKQRVVLARQLAKSPMMFLADEPTGTLDPQTAIKLHNTLKEGVKDKGITMLITSHWPEVMIELADSVIWLEEGQIKEEGEPEKVVNEFVATIPIPEKPEIPEFGEPEVVLEDVKKHYYSIERGVVKAVDGVSLNINKEEIFGIVGLSGSGKTTTTRMLMGLTEPSSGNIQIKLGDEWIDMTKVGPLNRGRIMPYIGLLHQEYSLYPHRTVLGNLTDAISLNLPAEFGKIKAIHALTTVGFADDVAASILDKYPDQLSVGEKHRVALAQVLIKEPNLIVLDEPTGTMDPITRVIVSDSILKARTELEQTFIIISHDMDFVLDVCDRAALMRGGKLLDIGTPEEIVDKLTADEKEDMLKENR

SEQ ID NO: 11464 - protein, 243 aa, Methanobrevibacter gottschalkii
MLKVVAPMAGITNAAFLNKVIPYGFNVATLGGYSLDSPTIEASKKIIQRGRKEFDFPLDVIFNHIENEVDLIKKYHKNVKVSANVRASNPQPIIHVGNIKKLDIVEINCHCRQKEILDVGCGQEMLKRDDLKKFISQIVDNVDSEVSVKIRANVDGIDTLEIANIIADAGADYLHVDAMKKGVFEADWELLRSICNDVDINVIGNNSVNSEINVRKMIGTGVDGFSIARSVISGNLEFDISDF

SEQ ID NO: 11465 - protein, 259 aa, Methanobrevibacter gottschalkii
MERGYSMIQMTLIQIDNYGPWTVTPRPRTESDLQILQARLFADLNSYFGSKKGLVFFTRFDNLLAISNGIDEEDHLRIQRSIRNKYPITVSMGVGAAETPHEAQKLATIALQKAGSAQSGERKEILAIDSLVDEENSFVQAAHIDINSVTETFTDIESAFDTSFSVNKAQHYLMTKLIKKGSLLFFIGGDNFMAPCNGLSEKEIENLMIEIDEEIGIKLKAGIGRAKNAEDAAYMADIGLEEIRAHNNGMWTWVVEKED

SEQ ID NO: 11466 - protein, 301 aa, Methanobrevibacter gottschalkii
MITVLSGGTGTPKLLQGLKEVVDPKDLTIIVNTLENDYFSGVYVSADIDTVLYTMADIINDEFWYGVKNDTFITHNRLEELGCSELLRIGDIDRATKIQKTQLMEKYGLGKACEIQAKNMNIQSKIIPMSEEDSDIKIITDIGELEFHDFLIKHQSEPEVSDLKFSKVSPTEGVIEAIENSEAVIIGPSNPITSISPILSLDGVCDALKDTYVVAVSPIVGSDSVSGPANKFMKALNIDVSSYGVASIYEDFLDTIVIDVQDNDKKDEINQIVNKVIITNTIMNNLDAKKNLAEIIIDSIP

SEQ ID NO: 11467 - protein, 254 aa, Methanobrevibacter gottschalkii
MSIELFGLENIPIIDGNSDISKIIKEAIEKQGCNLCHGDIILIAETLISKAEENFIKLDELTPSTQAIELAKKAKKDPKLVESIIQQSNEIVAVGPKFIITETVHGFVCANAGIDESNVGDGLVTLMPNDADISALNIRKYLENEFDEEIAVIITDTQGRAFRFGAVGTAIGCSGISPIWKRVGEKDLYGRELETTEIATCDELASAASLIMGQADEGLPVVVIRGFDGFDKLRDVDSNIKSVLMPKEFDVFRN

SEQ ID NO: 11468 - protein, 208 aa, Methanobrevibacter gottschalkii
MYTGRILSTGMNCEGKPFIAYRVSSRSFPNRQCLKFENRAAIVPKEGFEKDIFENPYITYNCIRIVDDVAIVSNGSQTDVISDKISLGMNLRDAMAYSLLTMDYEKDSYNTPRIAAVVTASTDEDGYGCYIGIVNDNKILVEQVPHGKAAFISTYGSQVPDTVDFDAKTANECAKFIFDEGAFADYEKPVTSSAAIFDGEWAIDVYNP

SEQ ID NO: 11469 - protein, 136 aa, Methanobrevibacter gottschalkii
MAIDVGKHKKKISDSKPSINLVPFIDILFTIMIFLVVTSNFSADVQTDDSDVTDGGSGKPNVTSVSGDSEYYVMPVANLHKVTVNGVDKSDTILNSAVGVQANVIDNGKITIKPGEIDITTPDGVSPDKAVQRPQL

SEQ ID NO: 11470 - protein, 279 aa, Methanobrevibacter gottschalkii
MIIESIMPFVDGIVDIFTQGGFITYIILFIGIYGLIIGLRKIAYLRKISKVDTTEIFGVVTASMERGGAVEALKQINGFKNPISRIISETLKIGYKNKTEVEESMEQIFIVEVGKMTKGLSTIKTLTELAPFLGLIGTVIGIWLTFKSLGVHPDSAAMAEGIYVALTTTIMGLLVAIVLLPIHTYIQGLIEVEMDKIELATKMTNWGYAVVKVRVDSNVECALEALQEAEGVVNTRLISDPYANIKVSFKPSMLDKSISNIILEKCNVNAEITESKLKQ

SEQ ID NO: 11471 - protein, 204 aa, Methanobrevibacter gottschalkii
MDILGIDEAGRGSVLGPMVIAGVIVPEKMDKVLERMGVKDSKRLTPNRRTILSRKLRKMFEYEIVVISAREIDELRANGINLNEIEKNAMESIILKLKPEKTIVDAVDVKAERFQENLCNDTCCNVVAEHKADDKYIEVSAASIIAKAERDAHINEINMDYVNFGGIGSGYPSDPTTKKFLTNYTYDEMPDFVRKSWATVAKMK

SEQ ID NO: 11472 - protein, 357 aa, Methanobrevibacter gottschalkii
MNIFGKEEEEPQINDTKVISNSLGIDLGTLNTVIAKPSGDKFDLYQIPSVVAVKKDDPSEVLAVGEEAKKMLGRTPEDILAVRPLKKGVIENVVQAQALLIKAMQIGINEGESVGRIVIGIPGDASEVEKNAAEEIGRKAGAQNILVISEGLAAAIGAGLPIAEPNGTMVVDIGAGSTDIVIISLGGINDIETVRCGGDDIDNKIVELVAEKYDVAIGIHDAESAKIEVGMVHCSEQLENLSVEIIGKSLETNRPKKVIIDSMLVAEAVEPYMQQIISGLNIVLERLSPELMMGVYNNSVAVGGTSRLRGMKERIFDEISIPIEVSDDPMTVVAKGTAIVAAEPLALEPEVRLRAMK

SEQ ID NO: 11473 - protein, 214 aa, Methanobrevibacter gottschalkii
MIEDNIRVLRQAAKVSSNSGYEIEKNWCVIAGNAEIIDKIAYKAIASNHRVKIIFREHVMLNDGKLDKKFDFIMLYGNSIVIDEFKKLADQYGGAYVRILHKYLIEEPNLMVFVAPDNVIKKTVSVIEKSKISFAILQDSQTTAFIDVDLSNEVKLPNFIKSALKPFYNANEVVLSTILISVDKKEEIKKVQSIATSNRIFVIDFKDIVTEDYS

SEQ ID NO: 11474 - protein, 231 aa, Methanobrevibacter gottschalkii
MKIENTNMKRFIALSDIISLLNMTSGFLSIIFSFNHEFNIAAILLIIAIMFDSADGWVARKINRQDELGFGKNIDSLSDIVSFGVAPAIFLYSCINTTPGIFQIIVTIVCLLIVVCGVLRLTRYNVIAGKINTNDFIGFPIPGMSLMIGSFYLSGIFNPHIAILLSIIVSLLMISNIKYPKFDNMALIGISCILIIILILPIDMILFNINIPAILLLFFCLYYLIINLIKK

SEQ ID NO: 11475 - protein, 389 aa, Methanobrevibacter gottschalkii
MNDKKPRDPLYPKGFEETRKLKNQLTKEYSKPNKKEDELTPLKKLNHKLGVYLSPNSVEISNDEKKKKIGIIITTLILITLISSAYYFLIYEPAQEELTLAKTTKLNELHEIYNGPLTTSQNSILLENQINDGKTPEEIERINILTPATKDWQSFHKKSIYTNKDKYNRTMAIYSNESKNIILSTTKAIKIVNENNAEVLSKIKFEEPNTVSVPILISRLQAGAGLVNVGSVVDIYTNNNNTNENYTPNNTSPNISGCTVLAIMRYEDNGEIDSKYSKSNTIIKGNHTNPKENTKEFSSDVLELIKGSIINGYDEEKTIEILKNYGIKLSNYERQINLGDLNAQYMLLIETPQDKVEYVINNMENIILTIPTTKAPNWMVNEISSTYQD

SEQ ID NO: 11476 - protein, 239 aa, Methanobrevibacter gottschalkii
MNKPTISTIVIIICILIIGLYAMGEVNYFSSKIAVERNIDSPTILIPSIGVNEKINNVSLNQGVLSDPGENIPTKDYVALYGHRTLQGSPFFRLNELSIGDSILLEWPGVGELNYTITNTTIVPGTADVPIGGNDSLFLITCDPIGSTANRIIIEGTLEKQNPINNEIIKENPQESNAIIITAIFFIVGCIFSYFYPKDNRIYILAVILIISALLFYSCINPIPSEIIYEKIIFLNGGL

SEQ ID NO: 11477 - protein, 124 aa, Methanobrevibacter gottschalkii
MDVDKKYFSNITTRERAIFEGAISMGALFHQFVGTPVNKYTKNGLEKSMEDSLRLQPAIEDVNVKIRFDKLKESMTEFDYTSLNGDMLDVKIYAKVDNVKAIIRIEFIEELNYPLMYVENITED

SEQ ID NO: 11478 - protein, 385 aa, Methanobrevibacter gottschalkii
MDEKSIDKDVILKELDELHNLDHNYADGRILGSMCTEAHPFAKEIYYKFLDTNLGDPGLFKGTKLIENKVIESMGEILSIEKPYGHVVTGGTEANLMAIRAARNHARKYKGIVDGEIIIPESAHFSFKKAADMLNLKIVEADLDDNYKINVGSVKRLISDKTVAIVAIAGTTELGLIDPIEEISKIAYENNIYFHVDAAFGGFSIPFLRDMGYDLPVFDFSLDGVCSITIDPHKMGLAPIPAGGILFRKEEYLDVMAVDSPYLTVKTQSTIVGTRSGAASAATYAVMKYFGKKGYSKLIKELMDNTQFLKENLEKIGYEIVCEPELNLIAFNHPNMETNEFAEKLEGFGWKVSVAKCPVAIRVVLMNHIKLNHLKELVEDLKEIF

SEQ ID NO: 11479 - protein, 758 aa, Methanobrevibacter gottschalkii
MYVKKFEDLNKSDIPIAGGKGANLGELTQAGIPVPPGFVVTAQTYEKFMVETGINDQVLSILDEIDINDTKALQAAAEEIKAIINEVPIPEDMILIITEAYNQLCQRCGEEDVEVAIRSSATAEDLPEASFAGQQDTYLYVSGTDSVLEYVRKCWASLFEARAIFYREENNFEHSKVLIAVVVQKMANADKAGVMFTVNPSTGEDIALIEGSWGLGESVVSGDVTPDNYQVAKKDNDIINVTVSDKKVMYVNDENETSVKVDVPEDMRNERVLSDEELIELTEMGKRVQAHYGEPMDTEWAFEKGELFLLQARPITTLGDVTGESVETSSDTGEVLVRGLGASPGMASGNVKIILDIDELDKIKDGDIMVTTMTTPDMVPAMKRSSGIVTDEGGVTCHASIISRELGIPCVVGTGDATTILKENTGVTIDGKKGLVFDGISEIKEEAVQVKVSAEAAPVITVTEVKANVSMPEAAAKAAATGADGVGLLRTEHLMLTAGIHPGKFIADGREDELIDTIAENVMIVADEFYPKPVWYRTLDAPTDEFITLEGGENEPEEHNPMLGWRGIRRELDQPEILKCEFKAIKKLHEKGYTNIGIMIPLSQSPEELKQAKSLCSEIGLEPHKDVDFGMMVEIPAAALTIEDYIDVGIDFVSLGTNDLTQYTLAVDRNNEYVAKHYSEEHPAVMKLIEMTIKKCVEAGVKCSICGQAGSVPRIVEKLVEFGITSVSSNTDAIAEVRKTVARAEQKIILDAARKRLE

SEQ ID NO: 11480 - protein, 160 aa, Methanobrevibacter gottschalkii
MVRAYTRRDYIRKTPNSRIVQYDMGNLKDEFPVSVSLVVKKPAHIRHNSLEAARIASNRLMQRAAGRLGYHLKLRVYPHQIVRENPMATGAGADRVQSGMRNAFGKPISVEAIVKKGQRIVTIDCNEKNFEQAKVALKRAGMKLPVPCRIVVDKGADLVK

SEQ ID NO: 11481 - protein, 75 aa, Methanobrevibacter gottschalkii
MNVKGKIYLDYNNKESAELIFNSLEIDNKNYLKSKLKEDKIIYEINSETLGSFLATADDLIASEIVIEKILDATQ

SEQ ID NO: 11482 - protein, 378 aa, Methanobrevibacter gottschalkii
MECYYHPEKESTANCAICGKSVCGECSLEIAGKVYCKECLEKIVGLGIQNNIPEENKSDEQNPIVTESPEVNAQSVDDNIYQPQEETDFEIPYTPQEEVPSKEFKGISDDSPYNIKENIEYTGGLESSYTIDSDIYQKPQVEQQPQVAQNELDIKQPTLNSMNKDDFIYPDHDYEPPTTSARQELEDKYEKYLDDLYFDENEVPLGEQLAKDEAQYGSLTRKEYASKPKNIVEPQIPTQKDEPIIETPEEMEARIRAEILKEQGLMTDTQSIDSTLKEELESSKGKKLFGLRRNKNNEEELITASEDKNIHNLNYKDEKEPMGVVDILLTIILVIVILIVIYYIVYLFLLSSTYPTFMDAVFAIRNPQNVINSILTQL

SEQ ID NO: 11483 - protein, 360 aa, Methanobrevibacter gottschalkii
MSQVLDILKRDKELFFSDVEMECNNSDTSSDMNLIADFTEYNPLHNGHFHCMKTAKHMFPDSLFVAIVPGLFERSGRGIPYILPREIRAEIAISVGADIVVEGPPMGIMGSGQYSLCLCKMFKSLNTDYIPRGYKPKEGFDEILKRINLGHHIAPKPYKIVDKTAHETILNDKLEEDNYVITSFSNSLSKIGFDYTNKFIFVKRIEGVSGTLIRESIQKDNFDNVLNMMPSETIEVLKREIKNNSIIYGIRDVESILDTANTFNFEELSALNLFNEKLAKNIVNNKPYENLDELEKVILHGFSSHFHQRVLSILENPIPKKIISKYIEKYPSNIRVLGYRNKEILEKFIKKVNNENISLL

SEQ ID NO: 11484 - protein, 418 aa, Methanobrevibacter gottschalkii
MDLVIKNCKLVNKIGEYSIKVENGKITKISKTPLKADKVIDIKSNYIMPGFIDPHIHFRDPGLTQKEDFKTGSKSAANGGFTTVIDMPNTIPKTNTYEALKEKIEIAKKKSVVNFELQAGPNNLEEMKKMIKLNPISFKIFMDLENDESLEEIFKNLSILKENTKYNGLVAVHCEKKSIVENETAKLKEKKENIPIDYTYARPTTSEDASVIQSIELAKKNDLKLHICHLSSAKSLHIAKNASKNMDVTWEFTPHHLLLDNTAYNTYGTFIKTNPPLRPKNESVRIEDLDETSIIGTDHAPHKIEDKTKGVWNSSPGIPNLETVVPLILTEVNKGNIKLDIIPKIFSKNAAMAYGLKNKGEIAIGKDADFTVIDLRQEGKFNIDEFKTKATYSPFDGWNYIGKPVMTIVNGNPVMDKL

SEQ ID NO: 11485 - protein, 411 aa, Methanobrevibacter gottschalkii
MIVFNDDGCIKCGACQGTCPTSAIEVTPNAIVHCDTCGEEPKCADVCPNGALKVEEYEIAEGISQARLVFNSILCDQCGKCEEVCPQETIKVTGTKLKEVEGFCVMCQKCVDICPVDVIGVPGVKEPAEYDLDLKGKGPVYIKDCVGCGTCVDPCPVGAITLDEVGSPVTVNDDCIRCGLCSQTCPWNAIFIAEKKPIKRTKEIKSFTFDSAKCIGCNTCVEACPGDFIAANSSSLTVAIPSVCAACSLCVNLCPVNALEIDVEWGEGSPVDAEGIGRDVEKCDFIGACANKCPTEAIRVVTKTGMSCPALVETDAEPSFTSCIRCGACASVCSNDALKVEQYEVTINGEAVARDRIAFNPSKCNQCGDCIEACPYDMIHKTENPKLPIAGFCTLCGQCLEACPEDALCYK

SEQ ID NO: 11486 - protein, 475 aa, Methanobrevibacter gottschalkii
MVKLTMEPVTRIEGHAKITVHLDDAGNVEETRLHVMEFRGFEKFLQGRPVEELARIVPRICGICDVQHHLAAAKAVDQIFGFDDYDILPAAYRMREIMNWGSYMHSHALHFYFLAAPDLIIPNGTRKTRNVFQVIKDMPEVALQAINIRRNGLEMVRKIGGRPIHPTSSTPGGISTELDDETQKDLLNRAKQNVELAQATLDLAIPVFEENIDLISSLGNFGDTRHCGLVKPDGTWDVYNGNVKIKDKDGSDLLEYRNEEYTDIVAEHVKPYSWLKFPYIKELGYPEGIYRVAPLSRINVCDDMPKEAPLARDALKDFRSAFGYAQAPLLFNYARLIELLASAECAAAALEEDLSGQKFPEELERTEGKGVGIVEAPRGTLIHHYESDENGLTTKANIVVATIQNNPAMEMGIHQVAKDYIKPGVEVDDKIFNLMEMVIRAYDPCLSCATHSMDSQMRLAEVDIVDSEGNLIKKF

SEQ ID NO: 11487 - protein, 308 aa, Methanobrevibacter gottschalkii
MADKVKIGTMWFGGCSGCHLSIADFHESLIDVMEFADFEFSPVLMDTKYDEVPELDIIIVEGGIRNDENRELSEMLNEKSNMVIAYGTCSCYGGIPGLGNLWTVEELEEEAYINSVSTVNPEGIIPHEDVPHLESRVRPIGETMDIDLMIPGCPPRSDVVAEAILTLLKGETIELPSTNLCEVCPREKPPAGLAMDFIKRQFELGAPEPDLCLISQGLVCMGPATVSLCGAECPAIGIQCRGCYGPTAKVLDQGAKMISAIASDYGVQEDKTVDPETVADQLDDIVGTFYTYTLPAALVPMKMQKGGE

SEQ ID NO: 11488 - protein, 141 aa, Methanobrevibacter gottschalkii
MADDVKIVMFCCNWCSYGGADTAGTARMQYPPNIRVIRVMCSGRIDPQFILKAFKEGADGVFVAGCHMGDCHYDAGNYKLDRRMRLVYKLVEDMGIGKERLHHDWISASEGEKFSEAVKMMVSRIKGLGPAPLKKQLNAEG

SEQ ID NO: 11489 - protein, 411 aa, Methanobrevibacter gottschalkii
MRNVYEDAERAKDKKAAIGADITIENFTDETINAIDMIDDLDDLSKQTKKDLLKVGVDTNEENRAGSFLQVDQSNIFTNNSISDSIEVMNMGIALEKYSWLEDYMWNVVKPDADKYTAKTALREKEEGVTSGYFVRSLPSTKEVMPVQACMFISDADIMQTAHNVIIAEENSELHLITGCATGDDISSAMHVGVSEMYLKPGSKITFTMVHNWAEEVEVRPRTGIKLEDNSTYINNYILTSPVSTIQSFPTAYCDGKNSRAIFQSIQGGKKDSIIDVGSRALLNAEGAKAEVISRAVAQDESKIYARGHLAGIVPNVKGHLECHGLVLSDDSFIYAVPELEASSTNLEMSHEAAVGKISEDEINYLTSRGIPEEEAESMIVRGFLNMDITGLPDELAQQTQNMIDMSLDGM

SEQ ID NO: 11490 - protein, 251 aa, Methanobrevibacter gottschalkii
MLLEIENLAVEVAGKRVLKGVNLSIAEGETHVLLGPNGAGKSTLFLTILGFPQYDVVEGSIKFKGQDITNLTTAERVQLGIGVSFQTPPAIRGISVGDLLKIISNQDVREELNPRMKELANQLKFSDEFLDRDVNLGFSGGEVKRSEILQLLAQMPDFTMFDEPDSGVDIENVELLASEIGTLLDKDKPQRIRQRSGLLITHLGYILNFVSADKAHVLIDGVISCSGNPNEILEDIRKSGFNGCVECAQCL

SEQ ID NO: 11491 - protein, 88 aa, Methanobrevibacter gottschalkii
MENKQIPRREEKLWSEIKNYQVATNNARILGVLDELIINEKTGKIVDIAIRVESDRNIHVKGAKRNGDLLLVPFAKVEKVGEFIIVTE

SEQ ID NO: 11492 - protein, 202 aa, Methanobrevibacter gottschalkii
MIYAILMAGGKGTRLETPCEKPLFRLHDKPLIKYVLDNLKESKLIDKIVIAVSPHSCETTKYLKSLNDDFEILDTSGKDYLVDLSYILDYFEQRSKEDILLFINADLPFISAETVDIVLEYYLKSDKDALSVLVPVEIFNDLGLDYSYEFDGNVPSGLNVLKSMNIIQDENQIVIPKVELALNINTLLDSKVAEELYKEYYI

SEQ ID NO: 11493 - protein, 489 aa, Methanobrevibacter gottschalkii
MSFLSKIFNKGPKPVIAKSREGNLATLTAQKAGPASPGVVKKPDTFYVTASVELGNTTTKCIVMATNLNTSESYLLNKTVKMTRDIRQPKPGEKVFGKTVWGIELSKEAVTELVKDTVLESLRKCNVDKDKDLDFVVRSTGVTAGFATAEEAGQLIIALADGCLEADIPPRKMSPAMSISQLPERLQKHSLLENIMFDGAVVSVVPPEGKETVANEMEGELVTAGIKLGAKWTDVDYRNPCVSLDFGSTLAGRIVNDHEPYANTIGNFLGLAGVVSDSLAKGSGLIDKKNGAALDLYSDKAMKKANHKKAQVNALEAHKLINIRKVPMDVERFGTVPLNPEAAEKAGTTLIGCDVGFNGDKLDELMELGAQFYDSDGLPTLLSTLDYVSTNIVTRLLDVAFEEDVIVPGSSLGITGRAGITGRKPQLILESVQDKFENVVFVEDGLALGSAIMARCMNSMGTPKVPIGGKQGGRCILKDRMKMNGGKFA

SEQ ID NO: 11494 - protein, 310 aa, Methanobrevibacter gottschalkii
MFRFDKEQLVVDVAGMKMGGQPGEYPTVLAGTIFYGGHNIISDEKAGVFDKDAAEERIKTMEEMSDVTGNPCVVQTFGATAEAMVKYLEFVGDVCDKPFLIDSTAAAAKIAGVEYVQEVGLTERAVYNSLSMAAEPAEIEAVKNSDIDASILLGFNPMNPGVAGKIEIWETGGDVIDKGILEMAEECGITKPFMDVAVTPLGQGAGPAVRTSFAVKSKWGYPVGSGIHNVPSAWDWLRGYKKEHKEAWPVCDIGSNIVQQMAGGDFVLFGPIENARLAFPACGMADIMIAEAAKDIGTEPVEDHPINKLL

SEQ ID NO: 11495 - protein, 79 aa, Methanobrevibacter gottschalkii
MSEENSIPQVMVSSDEFNDVVAKLDAAEEKVDFTVGEYYQRLGQQTGRDVGILYGIILGLMILIVAIKFGVASMLSTLL

SEQ ID NO: 11496 - protein, 68 aa, Methanobrevibacter gottschalkii
MVQISNKPNIGGMKTAADDAEYSSKLLAREGKLFAGLLATRFKGFAIGICIATLLIVIIPFIAKAAGL

SEQ ID NO: 11497 - protein, 238 aa, Methanobrevibacter gottschalkii
MADKKAPADGWPVISGDYIVGDPESPVAVTTLASHIEAELSGAAIAGPCKTENLGIEKVVANIISNPNIRFLILAGAEVQGHITGQSFKALHENGADPDKKKIVGATGAIPFVENVPLEGVERFQQQLEIVDLIDTEDIGAIQSKINECVEKDPGAFEEEAMVISVEGDDADEEEGEAIRVVSAETGLIEARIRDINTKIDMVGAVQRNMAGNYAGKVQGIMIGLAFTLIIGVLFLLF

SEQ ID NO: 11498 - protein, 109 aa, Methanobrevibacter gottschalkii
MAQMLPMVQVVPEMNFAYDPVSGVIGSSLGSGVVLLSMDEVNEQVAKVELAADELMASLDPYTSPVGSYPGREGSYVTAGLLTNIVYGFLLASFIIFAALPILQAMGVL

SEQ ID NO: 11499 - protein, 271 aa, Methanobrevibacter gottschalkii
MSAGGSADGAAAGAVDSMHLLVLGIVGGLLGIYLTAFLGETIGSLFAGLGAVCAIVWGADAIRRVASYGLGTGVPSIGYMSLSVGVISAFAGISLAAILKMPMVGPIAALLVAVIIGAVIALVATKIVGMKIPIMLQCTIEIAGAAALSILGFSAAIAGSFDMAAVYENVVATGFIAVLFILCTMAIQHPFNACLGPNEDQLRTLKCAASTAFLSMTIVGLMSITTGGLGWFIVFIVGLIGWIISFKAFVVASMNDAASTKWAGLWPKVEN

SEQ ID NO: 11500 - protein, 233 aa, Methanobrevibacter gottschalkii
MDPISLILFIAIGGIMIGAGVHFIPVGGAPAAMATATGVGTGTAMLAAGAGLTGLITAATMTGEPFYIIGIGGAIGAMIMMGITMLIANIIYIFGVGIVPAASKVPVDWITKRNQEAYKTPGTEGHGVPVTSFVSGLIGGLLGGFGGGLVYYGIDTAINQSSFVSDPAVSIGLAAIIGVGVFFINSVIASYNIGGTIEGMHDPKFKRIGTGAIACAIASIVVAIFCIILTGGI

SEQ ID NO: 11501 - protein, 292 aa, Methanobrevibacter gottschalkii
MDPVTLGVVALMGAVATIGGAAEDLESDIGSQSNPNSQVQLAPQMGHLHRMINKAASGEPVAYGVWCGVAGAIAYIVMSLGMLPIVAIAMGACVAAFVHAIYTVTSHMGRIVGQSQFEQPLFMDVLTQSLGPIVGHGFITSFCIVGISYLMTIPINGTALHVFPLPLLAMLWGIALGAIGSSTGDVHYGAESEYQKFEFGGGTPVAIQGDIVTKAPMGAKNSMDVVNFCAKFGGPLTGFCFGLVVFFSFWNTVVFGVYGGIIVGIIIVILLVIMDNYLEVFARNQYGPYEEE

SEQ ID NO: 11502 - protein, 555 aa, Methanobrevibacter gottschalkii
MVINMADKKFLNAMKQKFSEDPTEKSTQFYNMGGWTQSERKTAFVNEGKEIAEKRGIPMYNPDIGTPLGQRALMSYQLSTTDTFVEGDDLHFINNAAIQQAWDDIRRTVIVGLNTAHNVLEKRLGIEVTPETITNYLETVNHAMPGAAVVQEHMVETDPLLVADSYVKVFTGDDELADEIDSAFVLDINKEFNEEQAEALKAEVGSAVWQAVRIPSIVGRVCDGGTTSRWSAMQIGMSMISAYNQCAGEGATGDFAYASKHAEVVQMGTYLPVRRARAANELGGVPFGFMADICQGSRVYADDPVRQTLEVVALGAALYDQIWLGSYMSGGVGFTQYATAAYTDNVLDDFTYYGKDYVEDKYGDLCAAPNNMDTVLDVGSEVAFYALDQYEEYPALLETHFGGSQRASVISAAAGCSTAFATGNAQTGLSGWYLSMYLHKEQHSRLGFYGFDLQDQCGAANVFSIRNDEGLPLEMRGPNYPNYAMNVGHQGEYAGIAQAPHAARGDAFAFNPLIKIAFADKNLSFDFSKVRAEFAKGALREFEPAGERTVITPAK

SEQ ID NO: 11503 - protein, 252 aa, Methanobrevibacter gottschalkii
MVQFYPGTSQVAQNRRNFCNPEHELEKLREISDEDVVKILGHRAPGEEYKSVHPPLDEMDEPDDIVRELVTPIDGAKAGDRIRYIQFVDSMYFAPAQPYLRARSYLNRYRGIDTGTLSGRQVIEARERDIEKLSKILLETEYFDTARTGIRGAGVHGHSLRLDENGLMFDMLRRQVFNKETGNVEMVKDQIGKELDEPVVLGEPLDEETLKAKTTIYRVDGEAYREDVEAVEVCQRIHVSRSFGAYDPNAGW

SEQ ID NO: 11504 - protein, 199 aa, Methanobrevibacter gottschalkii
MIGRCTHVVDCRETSGMGKGGSLAQRGTFAECGTDVCAVAMSPGRRHITKPVCEITFGLRESNVLTSTVVLNAGAGVPHDAPASGGTLFGITEKEIDQLNNFKLLVIHLGGVANHIIYKARLILRNVNKPCVIICESPVDCEDFAKIGVKTSKVMPADEDIKTQGTIKDIVTGVIRGETISQEKLDEIIRKVKLALGDA

SEQ ID NO: 11505 - protein, 151 aa, Methanobrevibacter gottschalkii
MDIEIFPHRILGSDTTELLLNELESIDDVQRTVIHGPRFPKGEATLPDKYKERRVININGEDVVLQVKTARIFIELTMESTIKEIEEVCKKHIPFGFDINQDRANYIRKHKTVTDRIKYGSADLPDDLVGMTDQYSDFESHVNIIKRDNLD

SEQ ID NO: 11506 - protein, 443 aa, Methanobrevibacter gottschalkii
MAKFDDKVDLYDDRGSLIASDVPIEAISPLRNPAIQSIVKGVKRTVAVNLEGVEKSVKTGSVGGDKSKILGRELDLDIVSNAEAISEKIKGTIQVSEDDDTKVEPISGGKRLLVQVPSQRIDVSAEYSVAPLATATALVQAIIDVCDVDIYDANFVKAAVLGRYPQSVEYKGSNIATMLDIPQKLEGPGYALRGVKANDFAAATLKNTFQATALASIFEQTAMFEMGDAIGTYERLHLLGLAYQGLNADNMVMDLVKDNAAEGTVGSIVQATIARAEADGVIAPQKDLTDFSIYNTDDAAKWNAYAAAGAVAATMVNIGAARAAQGVPSTLLYFNDNIEFATGLPSIDYGRAEGVAVGFSFFSHSIYGGGGPGLFNGNHVVTRHSKGFCIPCVAAAMSLDAGTQLFSPEATSGLIKEVYSQIDEFREPINAVAIAAEEIKGDI

SEQ ID NO: 11507 - protein, 414 aa, Methanobrevibacter gottschalkii
MQIVADVGGIPGKDCNGFCKYCYFRKVKKVKSFGCAYCPPNKIGCERCSKGVSETQSEFKSPLQVMNEVRNSLMMNMHGGKVTANISGGGDISCYPHLETLTSNLNQISIPSVLSYTCGKGITNSEIASKLINNGVEEVSFTIFSSDPKLRKEWVKDQHPEEALKACKIFCENIKLTGAAVIIPGVNDGEILRQTCNILEEWGAKGMLLMRFANTFNEGLILGNEPILKGIESQPVEDFAELVRQINSEYSFRVSGTPLCDPETGGPFAIAKDENEIFLQFIKPITGEATIITSKIAAPFISKIFNKLEVDSVNVVAVEKEIACLITKEDLEKLDLNEIKDVAIIPGRSFVHQLDAERILSADGIERLVGRGPDTLSVDGELSIDMTDENVIETELEQFNDLADAINFFGMRRI

SEQ ID NO: 11508 - protein, 307 aa, Methanobrevibacter gottschalkii
MYETLTFTGGVHKSEEFKELIEDLGGFILQENIQQMELVLNMAVPLEDVDKVEEKANELLAKISIAPMAGSEIAIVSPTLARHHLPHAACDISEYLREFGAKDNMLGLARGDGKGTSGITEEEKDLINEHDIAIFSLGSFENCIKEKAFLYDDIDIPVIVTGAPDIPVEELPGADAYVGGLGRIPRRLRRGPDVRALDKLVETCEKILNDKKREMALDPPLVPSIVVKNAIENQVREIKDVFSPAPVTSQLDGVRVKLNYDDYADVISNVIIDDKKLSELAEIKKSFMYDYILVKINSESSLVENSN

SEQ ID NO: 11509 - protein, 172 aa, Methanobrevibacter gottschalkii
MKIVTTPMCEEIVKLAGISDYSINKNPDDEKGDLAILLSESNVKMDSLTIKINTPSQVFESIKKVSKITKNELSDEEVLVFFEDYRLCKKYLTSNFKRDINVKVYSNFLKDILLDMGFNIVFTDFKYVVYPDYLKDKVVESENLVEIQSHDNISKNPFEKIEIRYSILENLI

SEQ ID NO: 11510 - protein, 227 aa, Methanobrevibacter gottschalkii
MKVTLSFEKSESSDVSIMVDALRASSTITLALNNFEKVIPCFTPEEAFKLKEKLGGIVAGERDGKKINGFDLGNSPADIKDYTSDHLILTTSNGTRILENMKSTVLIGSIINACEVANKSIEIANNHIDVVMAGVKGEFAIEDFLAAGEILYWILQELPDCNLSEYAKAAVLASRNYESLKESFFNSRSGKRLIELGYESDVELCSLKNISNNVAIYENQELTLLKD

SEQ ID NO: 11511 - protein, 390 aa, Methanobrevibacter gottschalkii
MKRELLTIIGTAHVSEESVNEVKDAIYEQHPDIVAIELDRGRYAKIRNKMHGIEEDDNISVTRIIKENKVGLFLVSTLLGYFQSKIGAEVDVDPGSEMIGAIEASKDLGIPIALIDREINTTLQRALNKMGFMEKAKFAYGLIASILGFDNDEEEIDIEELKNSENIDDMMEMFKDEAPSVYEVLVHERDAYLAGKIMQIPYDKVIAVVGAGHKPGIEKYLDNPETLPDLKELEIINDKKGIPWLKIFLALIPILFVVIFFLAYFNGINITGNIYEFIVISVIMGFIGSILSGSKIQSAIVGGIVAPLTIIHPLLAAGWFSGLTEAKYRKVKQSDIKNLVKIEGFKDLWNNNIFRILLVVIGTNLGVSIATLVILPSKVFIPLFMKIFGG

SEQ ID NO: 11512 - protein, 70 aa, Methanobrevibacter gottschalkii
MYFIFRCDCGRALYAKEGVATRKCVCGKTIKVKSRRIFQKVATREEASLAVQEMQDKIYGNTGFMKASDL

SEQ ID NO: 11513 - protein, 439 aa, Methanobrevibacter gottschalkii
MIGTTLKIVIIIILIILTGYLSMAELAVVSIRKAKMQKYLEDGNKNAQIVFDLLEDPNEFLSTVQIGISLIGVLTGAFGGITLAEPLAKIIYFIPYSDMISVVLVVLVTTYLTLVIGEIVPKVIALNDPEKVSLKVAKSMVILSKISKPASFVLAKSSSFLLWVLRIENKNDEIVTEEEIELMIKEGREDGTIEKEEEDIIKRVFKLDDKKVESIMTPRNEIIWINLEDSRDINKIKIVESKRSIFPIAKGELDDFIGVVQAKDILSVMFSEEEFDINTIIKEPLVVSEHLETLELLKEFKENQGYVHMSLVIDEFGSVEGLITLNDLLEGIVGDIPGIDEEDEPEAIKREDGTWLIDGRYPIDKFKKLFKFEDPLPDEEEDNYTTLAGFILSISGTIPDEEDKYECGRFIFEIIDIDGHQIDKVLVTDLGPQEDIEEE

SEQ ID NO: 11514 - protein, 314 aa, Methanobrevibacter gottschalkii
MDSGIIIQVVLLIVGFVFLIKGSDIFVDGSSSIASLLKVPTIIVGLTIVAFGTSAPEAAVSIISSINGNNAMAVSNIIGSNIFNILIIIGVGTLLGDLLMEKNVLNRDLPILIGVTLLLTAFIIIGWNISTIEGIILLAIIVVYVFSLIHSSKKDSHAHDVDKPKLSTKKSISFIIIGLVGIILGGDLVVKSASTIAISFGMSETLVGLTIVAIGTSLPELVTSLTALKKGENQLVIGNVIGSNIFNMLFVLGASSAISEIPLDSSLLVDVMFMIFITLLCFIFGKTQEKYDKKEGIIFIALFIAYMAFAILRN

SEQ ID NO: 11515 - protein, 291 aa, Methanobrevibacter gottschalkii
MSKLNKDEFNDYIFTRINTLIHDYELIREGELIAVALSGGKDSVLTLHALKNYQNQLDFDLVAISVDEGIEGYRQHGIDSAVSNANELGIELIQKSFKEEEGFALDDIYQDFKSACIPCGVFRRNILNKTAYEIGAVKIATGHNLDDEIQSFLMSFARGDTIKFSKFGPELDVIHPKLVPRIKPLWNTPEKEVGMWAIINDINIHLDECPYSHLSLRAKIKEFLNVSEDKYPGVKNNVMESFQKILTFENDISANLNECELCGEPTSSNICKACELKELISQDCESHICNK

SEQ ID NO: 11516 - protein, 101 aa, Methanobrevibacter gottschalkii
MITCDFAILPVGTETTECKEYVTAAVQSIKDSGLSYQLTGMGTQIEADDLEELYTAIAKAQEAIFKLGIGRVYTVIKVDDRRDLENRTLDAKVSTVEEMLK

SEQ ID NO: 11517 - protein, 368 aa, Methanobrevibacter gottschalkii
MVSNIKVPIAKPIIGEEEIENVVEVLKSGMIAQGPRVAEFEQKFADWVGAKYGIAVNSGTAALHVALLSCGIGEGDEVITTPFTFIATGNSILYTGAKPVFADIDLKTYTMNPESIEALITEHTKAILPVQLYGQSANMDKINDIAEKHGLMVIEDAAQAHGATCNGRKVGSLGDMSCFSFYPTKNMTTSEGGIITTDDEELAENAKIFRAHGASVRYHHDEVGYNFRMTDISAAIGLAQLDKIDGFNDKRIKNAAYLNEGLKDVDGIITPYCAYDSKHVYHQYTIRVEGNRDDWVDIINECGVGTGIHYPIPLYNQPIYKSLGITGNCPRAELAANSVISLPVHPSLTKEDLDLVIEAVKMASEKLA

SEQ ID NO: 11518 - protein, 388 aa, Methanobrevibacter gottschalkii
MEEYKIKTIEEGLTKIEFPEFDKVSSDAPVFYNPHMELNRDLSILAIQVFQKEQKREINICDLFGGSGIRGIRYKNEIDGVGEISINDISETANHYEKHNIKLNNLEDIEVYQHDASMFLRMKRGEFDVIDIDPFGTPSPFLDSSGYCAKRNSLLCVTATDTSALCGTYKEPCIRKYNAKPYKSEYCHETGIRILAGFVALTLSKYAKCIDVKMSHSTEHYMRLYLEIKKGSKRTDETLNNIGYISHCKNCLHRQTSNGLASSIDAICPVCGEKLIHAGPLWLGPIQNGEFIQKMIEETENKKINSEKEALKLLNKCHDEANAPATFFDIHLICKTLKISAPKFDLILDELKKEGFIAVKTHFKPLGMKTDASIENIKNILIQLQSKI

SEQ ID NO: 11519 - protein, 158 aa, Methanobrevibacter gottschalkii
MVKTKDNVIKLDDTDIKILKIINEDVRTSYRQISRSLDVSVGTVHNRIDKMVKSGVIKKFSPVIDHEKLGFVLTTIIGVRVKGGKLKNWEEKTFFNKNVVGIYDVTGEYDAFLIAKFRNTNELNGFIKELLKDPIIERTYTQTVLDVIKEDMGSSNIL

SEQ ID NO: 11520 - protein, 312 aa, Methanobrevibacter gottschalkii
MAVCLPDTQDDAPSIPIKLTRVGVTGVKKLLQLDRTNKRPIILLPTFDAFVDLPNDQKGVHMSRNPEAISEVLESVAKDPTVDIESLCAKIVEKMMTKHEYAKRVEISMTTDYMFMKESPVTKNKTQEMSKLIAKAIGFRDEKGNIKIRKSVGAEVIGMTVCPCAQESVRESDKNKLLEFLDEETTQKVLDTVTFASHNQRGIGTLLIEVPEDKKVKAEDLIDIIESSMSSPVCELLKRPDENATVMNAHRKPVFVEDCVRNMMEKIANKYANLPDDTLITARQENQESIHRHNAYAEKVTTMGELKSELDI

SEQ ID NO: 11521 - protein, 146 aa, Methanobrevibacter gottschalkii
MKKSYEIAGQVMGFFESFKGSRPAINNDRILIVRGRSRKIIPINEFDSKLSEIGEILGGTELNASSEKISEILQYGDKNIQKSEGNTTSIDEHGFTRMKDELESMGLVVAYKVFELLGFDVVIAIWEDRNELPPLYVEVTVSEHED

SEQ ID NO: 11522 - protein, 370 aa, Methanobrevibacter gottschalkii
MKIKMQNKLNKEDILHILNATDNEIINYMLKTVQYRENHLITYSKNVFIPLTEICRNDCGYCNFKKKSDDPEAIILKTKQEVLESLKEAEKYGCKEALFTFGEDADKEEVVKLKLAEYGYEKMIDYIIDICQMTLDETSLLPHTNGGNFSFDDLKRLKEVNASLGLMLENTSNRLMELPAHNKSPGKNPKLRLETISNAGKLKIPYTTGILIGIGETKEEIAESLIAIRDLYDKYGHIQEVIIQNFTPIPGIEMENWPEPSFLDMIKTVIAGTLLFGDTDVSIQVPPNLNNETAQIFLLCGADDWGGVSPVSRDYVNITSPWPGINELKKLTIDAGFKLTERLCIYEKYINSEWLNDNLLKKASNLSKHQ

SEQ ID NO: 11523 - protein, 242 aa, Methanobrevibacter gottschalkii
MKYKKIGDILILDNKYSDNNFDELSRKHNVKTIMKIDHIQGTKREPIYKILYGEETETIHRENGCLFKLDLSKVMWSKGNNNERLRIAKLVDDDETVLDMFAGIGYFSIPIGVHSNPKKIIPIEINPNSYHFLCENIRLNKLTNVTPILGDCMMKTPKFKADRILMGYVKTTHHYLKIAIDSLNKGGILHYHETVPEKLINTRPIERIKAQAGNRDVELLKINKIKRYAPGVEHVVIDALIN

SEQ ID NO: 11524 - protein, 204 aa, Methanobrevibacter gottschalkii
MKDKIVEGTTTVGITCKDGIVFATERRATMGNLVAHKVAEKIFKIDDHIATTIAGSVGDAQSLMKVIGAETSLYQMRNNDEISVKAAASLTANILRSGPMYVQILLGGMDEDEPSIYSLDPAGGMIKDNYISTGSGSIVAYGVLEDRFRDDLSVDEGLELAIRAIRAAAERDTYSGNGFLVAKVDKDGFEMLDNEKVKEILDKI

SEQ ID NO: 11525 - protein, 637 aa, Methanobrevibacter gottschalkii
MASDILEDIKKEILQKLPNKIQVSKVEFEGPEVVVYTKNPEIITENGDLIRSLAKELRKRIIIRSDKSALLDNESTINKIHEIVPDGAEITDIYFDTVTGEVVITAKKPGLVIGKYGVTSRNIVKNTGWAPKILRTPPISSDIIGKIRTIQKNSSKDRKKLLQRLGRQIHQGSKYPNDWARVTSMGGFKEVGRSSMLLQTPNSRVLLDCGVNVAASDNKNAFPYLNAPEFSIEELDAVIISHAHLDHCGFVPYLFHYGYDGPVYCTTPTRDLTTLLQFDHLDIAHREGNPLPFTSKHVKQAIKNTITLDYGEVTDISPDIRLTLHNAGHILGSAISHMHIGDGAHNLVYTGDFKYEPSRLLEPATIRFPRAETVIMESTYGGKEDIQPSRNNAEKEMMKTIYKTLKRGGKVLVPVFAVGRAQELMVVLEEYMRHGLIEEVPIYIDGMIWEATAIHTARPEYLSKDLRDQIFHMGRNPFVSDMFNKVQNHDQRKEIVESQDPAIILSTSGMLTGGNSVEYFKWLCEDERNTLIFVGYQSEGSMGRRVQKGWKEIPLEDDDGKTRIFNVEMEIKTINGFSGHSNRRQLMEYVKRLNPRPEKVITCHGDPYKTVDLASSIHRSYKIETKTPINLDCVRIH

SEQ ID NO: 11526 - protein, 339 aa, Methanobrevibacter gottschalkii
MVTYSESGVDIDLEAITVSKLADKLKSTLECRDIITDSGHYAALVKLGDKAIAMSTDGVGSKILIAEMMNKYDTVGIDCIAMVVNDILCVGAEPIALVDYLAVEKPDPERAAEIAEGLVKGANESKIAIIGGETASLPGIIKDFDLAGTGIGFVDIDKIITGESIQPGNVLIGINSNGIHSNGYSLARNAIFDKGGFSVDDKMPNGETTIGEELIRPTELYVKPIVALFKKEYNINGLAHITGGGFTNLRRLKKGVGYEINSLPEVPEIFKLIYEQGVDIKEMYKVFNMGVGFVVICDEEEAGKIMSTLDEYCNCQIIGKVTDDETIKVKSFEGSELEY

SEQ ID NO: 11527 - protein, 343 aa, Methanobrevibacter gottschalkii
MMKIMMDNETALVKEILKELGASKEDQELVAEATVDADLKGFTSHGLGRFPQYLISIKAGTINLDENITIEKETPAMALINGNSGFGQAVSYKAMQIAIKKAKEMGIACVGVHNTNHFGVTGFYSDLALRENCIGLVIANTDPAIAPIGGKVPLIGTNPIALGIPSDSYITVDMATSVTARGKILESKRKGLDLPDGWALDANGNPTNDPEEALKGSILPFGGFKGYALSLLIEILTGPLVQAGYGHEVTGTASPDKNCTKGDLYIVIDPSKFGDFDEFKANTEDFISQVRSTGENIPVPGDLEVKRVKEAETNGISIDEKLYEQLKRICDDLNIDLDSYLEE

SEQ ID NO: 11528 - protein, 789 aa, Methanobrevibacter gottschalkii
MYKCISAYKIKIINIKNMTNFTKNDSFKEENKVMKLKDSYILLIAMAIFLLMSIGSVCASEISADDTIGLADDGSDVVMDDKPIEPSNPTTPHKVDTMIVSSDTVSINEKEKIKSIDLTVNDTNKSKVIAGITVKNLTVKEGTKTIKFDYNNSKVIIKDALVLGKHDLLVSYLGNENYTNSSKNIVLTIFGNYTIQAPTSVDVNSTKIVEVPINVTNGIDPKELVKDDFNVTLTYKDGNITKAINITDFRIINNTIIFNYPLSRNITTSTITLVYTANETVKSKNVTINRIYNVKIEGINTKNQYKNGNFTFRLTDIDNATENLTGFKLNLLIGKNVINQITGTADKNGIVNFKTSKIFGYDFNNNTIVIKYLNVGNNTVELKSGDNVKLTTNKVNLTIEKAKINITIDKYNEQYGSNKNLTITVINADNGEPVPGIILHLNMPQTAGKNYYIQTDTNGIGIISVKGLIPGKYNLTVSNNDTVNIINNKASSKIIITPKPVTIKITSGLTINYNTGNTAAIKVTDKKGKGVSGAYVLVQLYTGSKSANYLFQTDKYGNIKFKAPLSVGKHKIVVSGAVGYSSSKVTKYIKVKKATAKISAPKVTAYYKQGKYFTIKLINTKKSNAPIYAAKVDIRVYISNYKYYKFNGKTGVDGKLKLSIDLKPKTYKVEVRGADSKNYAASKVVSKIVVVKAPTKLYPAKLTAKKGTNKYFKVTVKNTKTKKVIPGVKVKIKVYTGKKFKTYTVKTNSKGIAQFNVKSLSVGKHKAIVSSANKYCIAKSAKNYIKITK

SEQ ID NO: 11529 - protein, 598 aa, Methanobrevibacter gottschalkii
MQRNVVILDIDYVTYENKPVIRLFSKDGDKNIILLDDTFEPYLYVMADDLDKCIDEIQNNFDVVCIEKVNKKDFQIEKEFLKVTFNHPQELAKNRDALRDLESVVQIREFDIPFYRRYLMDRDVIPMTEVVAIGDKIDSFLDLDSNKQDIEIIKLTDELKRSPDYPREFRILSFDLEVRNPHGMPNSEIDEIIMIGVSSNFGINQVISTKTNSDCRDDFVNQMNSEKEMIEEFVKIIKENNIDIIVGYNSDNFDFPYLKDRAKILGIDLDIGMDGSDIRFIRRGYANAASFKGLIHVDLYLVMRRYMTLERYTLERVYYELFGEEKIDVPGDRIWEFWDNGGEELDNLFDYSLDDVVSTLKIAEQTLPLNLELTRIIGQPLFDVSRMATGQQAEWFLVKQAYFDNEVVPNKQGANFANRAAAEDNEGGYVREPEKGLHENLVQFDFRSLYPSIIISKNISPDVMYLGDVDNEEDYNISPEHGLKFKKEPQGFIPSVIDKILQERFRIKREMKASDDDTEKKALNVQQQAIKRLANTMYGIYGFPRFRWYSFECAKAITSWGRQYIKSSIKKAEEYGFYAIYADTDGFYAKYKKKDKRN

SEQ ID NO: 11530 - protein, 340 aa, Methanobrevibacter gottschalkii
MGIEIEKYLNFPVLLICFLLITSLIFIFPALKMIVLGAILAYLVRPVAFKIQSKLKFSSVSILIAMVIVLIPLIALVGYISYELSSVASTMLASSSTADINESILKLITYLHIDVNPNEISQSIISSFETIASYVMNYGVSFLGKFANLTLDLFILVCSVFYFVRDGDNCLNFIKSFVPEGSVEFFDKTVDNIKDVLKSIFYGHFLTAVIIGIFGCIGYSILGYPFGIFLGVLTGILQLIPIFGPWPIYWTLFFIDALSGNYPRAIMVLLFGFFLSTIDMYIRPALSSHYADIHPLILLVGFLAGPLVYGIVGFIVGPLILGITYTVLDSYRKEYLMRVE

SEQ ID NO: 11531 - protein, 266 aa, Methanobrevibacter gottschalkii
MINEPKIVEITDIIDETPTIKTFKFDWNMKSLGKPNPGEFVMIWNFKNEKPMSIAQINDNELAITVKNIGEFTSQLHDLKIGNQIGVRGSYGNGFNNSFEGKKILAIGGGVGMAPINAIVSDLIKKGNKIDVVAAAVTKNELLYATSLEELGANVHHCTDDGSFGFKGFATDCTRNLLQDSTYDYAFVCGPEIMMKGIFDILEEAGISAQYSLERYMKCAIGICGQCCVDSEGWRICVEGPVFENDKINKITEFGKYRRDASGVKY

SEQ ID NO: 11532 - protein, 303 aa, Methanobrevibacter gottschalkii
MLKTNICGVEFRNPLMLAAGIMGSNASSMNWILKSGAGGVVSKSFSLNSHPGYVNPTTVAVEGGIINAIGLSNPGVANFKEELEKIERKNSVVIASIYGATPDEFSSLVCEVQELVDMIELNISCPHAMDGYGASIGQDCNLSHTIVSAAKDASDVPIIAKLTPNVTDITEIAKTCEDAGADCLSLINTLGPGMKINIDVARPVLSNKFGGMSGRSIKPIAISNVYSVYESVDIPLIGVGGIYNWEDVVEFIYAGARAVQIGTAIMDEGVEVFDHINEGLERFMTEKGFSSIDDMVGLAHREL

SEQ ID NO: 11533 - protein, 204 aa, Methanobrevibacter gottschalkii
MVYEDLIYLKIIELVYCCCLFGFEIMSDGSYKDLKYELELKNAEIDELNIELENKKEEINKLRLYATKLKYEKKNLEDKLDTKIDYDKATMSELDDLSDKIKEKEVIIEDKQDQVRYLRSLIDDYKIQVSNNTENLEIQLRKISKTYGELLKQKDSIIEKQDEQISNLLKSKEEIIKSNKTNIIGLKLQNEKYQEIIDKLTKTN

SEQ ID NO: 11534 - protein, 383 aa, Methanobrevibacter gottschalkii
MECYITYSVKGFLAFNSENELISEKLFPEDKIIDRLAEIDDKKIVEEELEIIEEVSSDYDEIIIESNKRRSDYDNEKIIVKTPNQGGEYLRNNYEKFKLDSEEITSIYRNLAIYKIKKESASEDKHLIQAINSIDEIDESISKLIERIREWYALYFPEMDVIHNNETYIKLISQNKTKEKIIEAKPDAFPNDIIDLEEDINPLDLEIMNNYANSIYELQKSRKNIEDYIDKKMESIAPNLKLLVGSSLGAKLISHAGGIKRLAVYPSSTVQIMGAEKALFRHLKSGDRPPKYGLIYQHPQVRGAKWWNRGKIARMLAGMISLAVRRDVFTKTFDENVADELTSKIEEIEKNNPFPTKTTKRRNEERSKSKKSKKKGKKRKKRR

SEQ ID NO: 11535 - protein, 213 aa, Methanobrevibacter gottschalkii
MNVYFKDGNVATKNLNPGTSVYGEELIQEDVEYRIWNPRRSKLSAALLNGLENLKLEDTSKVLYLGASTGTTVSHISDVLINGRIYAVEFSPTTAKKLVQLSRKRFNIAPILGDATKPKEYLNIVEKVDLVYCDVAQPTQSELFMKNINMFAKDNAQGLITIKARSIDVVQKPKKIFKEQEKKLKEKGFKIIEKVKLEPYEKDHIALLVEKNF

SEQ ID NO: 11536 - protein, 182 aa, Methanobrevibacter gottschalkii
MKNNVLKRSLIIISFIFLIICAFSCVNAQEDNSDITMMTLSKGGIVIHYPSNWGYSQSDSNYSIMSISKLDSVDSAGVGQVNINFEKKAIEGDFYTYLNNTYRSMQRDSSFNLTSSGEVMVSNIHAYEYMYSSNQNGTVKEHKAVWFEKGGQAYVMLYSAPVNDFEDNLYVFDYILSDIQIT

SEQ ID NO: 11537 - protein, 241 aa, Methanobrevibacter gottschalkii
MPNDRDKLLKIMDSLEVDYRSGKISPEKYSYFRSKYEDKLNSIDAKEATQRIRSMQGKSNQTTSIKRSRKPTKNKKEKEQDLVQKYIINPKKGDAKYNKKEKKSMSSGTFKLVLLLVLVVAFTVGVGYGVFNLDFNNISETSTVAMVHDTAFPDITEDIKNTTKTTSSSNTNYSSTSYNVKTTEDSSSDSDYSDGGRNSGSSDSTYSGSDSGSGSSGSDSGSGSGSSSNSGGSESNGRSDE

SEQ ID NO: 11538 - protein, 266 aa, Methanobrevibacter gottschalkii
MQIKNLMSENLITIDKDQNLSDALKLLRKHNISRLPVTNNKELVGIVSERDIANKLGSSKSEGMPASRFHISSVMVKDVITVLETMQLGDVAELMLENGIGSVPVVSGEGMIGIVSKADFVTLAVGIAFDKITVKEIMTGDVVAVSPTDRLIHARRLMIDAHIGRVPVIEEDELKGIITSKDLMRAFIDFRKNVPEKHQKSQIKEVLVEDIMSSNPSSVSKKMSISDVSKIMIETGFNGLPVVEDGKVIGIITQTDILRLIAKLES

SEQ ID NO: 11539 - protein, 311 aa, Methanobrevibacter gottschalkii
MKDKTSINRKSNTGAVEHVTKVHDREGDIMALATKEVISIPPTKSIKDTAKVMMEHEFRRLPITDPGSGKLLGIVTVMDILDFFGGGKKFNIIEKKYEDNFLAAINEPVKEIMTRDLITLSTKVSIGDTLKTMLDNQLGAIPLVDADGKLAGIVTERDIALSLAGMAGKETVHEYMSPKVFTTTPGTPLESACKIMVRNGLRRIPIVGGEADISKANKKLLGILTSTDVIRFLNAKELFDNLNSNLASDVLKITVSEIMVKDPITVEQTMTIGELCQLFAEKNIGGVPIIKDDEIVGIITERDVLNSVRRA

SEQ ID NO: 11540 - protein, 232 aa, Methanobrevibacter gottschalkii
MKAPVIEIFSSFQGEGLLIGERQIFVRFAGCNLNCKYCDTEDSKSEKSGKLMTVDEVCREINKILTPDCNTISFTGGEPSLYPEFISEVSKNFNLNIMLETNGTLPDNINKIEQLDVVSLDIKLPEHFNGNFNEDILLNEIKSVNLLREKSISVYCKVVILPSTKIESFKEVIEKLSKNISNKSNLKIIIQPSSPLKDWKDINFRLFEYSEVVGQYFDVSTIPQIHKILDIE

SEQ ID NO: 11541 - protein, 171 aa, Methanobrevibacter gottschalkii
MKILVNGIQSNLRFSSAHVIPGHESCGFIHGHSYFVDVEIEGERTGKFEFVVDFKDVKGFTKEFCNELDHRLLIPVFNELIEFKDFDKKTDSIDGLKENKTIQFKIDGKGYSIPSVDCVLLPLPYTSAEELSKYFAEGLAEKLSESYDNLKYVAVCVNEGIGQGAEYRKEL

SEQ ID NO: 11542 - protein, 198 aa, Methanobrevibacter gottschalkii
MSIIHKHIDEIFEYDGSQINPSWAFQEFGVYGSSIITWIGPVNITPDNLKDFADVGLEIKSNYMVNFICEFFDQQPPNMRIAYLRQRLIVMIFREILTEYGIKTKREGDDIFVDDGKLSISIASISLSSAKIHFALNLEDKGTPDDVETIGLFDIKDENGTQIFNKDNLSDLINETASRFIDELQTIENDISKTKVLG

SEQ ID NO: 11543 - protein, 357 aa, Methanobrevibacter gottschalkii
MEQVRTRDFIYTSDDLYFASTNYIHPEDRVISFLRYIPDPEGDREKDGKKYRKVGSAEAYEYLRENHPDYLYFCDVTNVEMMGVPLDKVKRIIKPEKRLLGLKDTFDNGGEVKNPELIAKLMDVADFFHFMANIPYDHLGISGSILPGLQKSDVSDLDFVVYGLDNHRRAISAFKKHRGKEVYIKEVDKHITVEGITNDYWDFVYNKRMSDESLTKEEFRWYENRKANRGTINGTLFDILATRDYDEIEGTWGDTVYEPQGIAQIECDIVSSLGAFDNPSSYTIENLKILEGVEAPIKEIVSFTHTYAGEVIDGEHIIAKGKVEKVTIQGKEDYYRIVVGTTRESIDEYLKLKESPA

SEQ ID NO: 11544 - protein, 492 aa, Methanobrevibacter gottschalkii
MSEKRIEWNSNFAFMMAMIGSAVGLGNIWRFPNVLYSNGGGSFMIPYIVSLFLLGISFVLVEYAVGFRFKKSIGRILFSISKKLEPIAWFIVLIVFLITTYYVCVVGWDLIYVVLSFTKAWGANPDTFFASNVLQATDSISGIFQIVPIVLASVFAIWFMIWFIVKRDLNDGIGNVSKILLPTLCLMVVIIVVFSLTLPGASIGYTQIFTPDWNALTNLNVWLAAFGQIVFSLSLGMAIAMTYASYLPEKSRLIDSAVTVAFSNSAFEVFNSIGIFSILGFMALSTKIPFDQLVTEGTGLAFVVFPQVFNTMGPMGSIIGPLFFICILFAGITSAIALLEVVTYAISEKFNIERKRTVTVICIVGFLISTMFATGIGSTILGAFDAFLNNFALLLGILIECIIFGWIYDFNKLIETLNKDSRIKVGKTWKAVIKYILPICIAVLWIQGVYSTITSSDNLSLTIMGILTVILIVLPIVFAKLPAKNEDYYKVD

SEQ ID NO: 11545 - protein, 247 aa, Methanobrevibacter gottschalkii
MGKLDGKVAIVTGSTSGMGRDSAKLFAEEGAKVVVTGRNEERAKAVVDDIKSEGNEAIYVIADMANVDDIKKVFDTTMEEYGTVDILFNNAGLLSVTPLLEMTKEEWDKVFDVDVYAALYLTQLVAPVMKEKGKGTIINTCSVASYAAHFGFVGYISSKHAIAGLTKSMAFELGPEIRCNGIAPGAIHTAMVDSIGGVEALQMMVDGAPMKRVGQGEDIAALALFLASDESEFVDGQIIRCDGGFEC

SEQ ID NO: 11546 - protein, 264 aa, Methanobrevibacter gottschalkii
MINLSSIKMHMYCPMSLYLKTHVDIDENDMYNCYLEIKNLKIDIQDLMQKNIRKIKRTMSLEEIEKILSQNIYEYIENTTKSMKSSNIEITSEQISEINDETYFNIKILSIKSKKAMTILNKDGFGITEMFFPNCLYSYLIKDTQLELIGICDKIEIIDGRYYPISIKSSNPPIKGVWDQDAIELVANAILLEEEFDTEIFVGFVDYKKIGDRRPVIMDVNLRKSLFSVIREVKEIIENKKLPNIKRNSKKCRNCEYENICMKK

SEQ ID NO: 11547 - protein, 219 aa, Methanobrevibacter gottschalkii
MNDYTLTIKSDEKKGVLYDITDVITAYGANISYVHLFVEKNNMGSINLELEHVENIEDLIKDLEKIKEIKSVELHGSQLDIYGKRIIIIGGGAQVSQVAMGAITEADRHNIRGERISIDTIPLVGEKSLAEAIEAISRLPRVSALVLAGSLMGGEITRAVKKVKEESNLIVISLNMPGSVTDYADLIITDPIQAGVLAVMSIADTAVFNIKRLDGNIRF

SEQ ID NO: 11548 - protein, 87 aa, Methanobrevibacter gottschalkii
MKFVMRPYHIISLGGYIVEWDFPYRNLIVVNKTSEPIKIEIPVFNEEWIQEHRDLGLDIIPVNKYDNYLSMWKKAHAELDKIRPKNE

SEQ ID NO: 11549 - protein, 332 aa, Methanobrevibacter gottschalkii
MYSNILTNSIVAVILTVIVCFVISTLLPGIERKYVHARIQQRVGPLVFAPGIMAPLKFLFKENVEVSSPVPKLYKILPILCFIVILCVFIALTPQAYKIPALSSLVAIVGFLKVEEICYVLMGALSKSVMSVRMPFPDRIKGAAHIKAPLSFIEDISAKRSLRMITYGSFPLYLALFAPVTAARSIFLKDIVAFQQVHGPFLFTVAGGIAAIVFFIGYMIILNEYPFSIIKAKSDVIEGPYMEYAAKYRSIVFITRGFFMFVLGSVFSVLFIGVPPSIFSLGILVNIAVALIFVFMMGIFSAFAPVFTNKQLLPTILGTTLLGILAIALGLL

SEQ ID NO: 11550 - protein, 376 aa, Methanobrevibacter gottschalkii
MDEKLPTNNIIETEIPMGTVHPAALEPYKVRFFVEDEIIQEAEITIGVNHRGIERIMEGLPVQKANSLTEKICGICSNSHIWNSCRTAEIGLDIEIPERATYIRVIMGELERLHSHFLYLAHGCEVLAHETFSMRVFYLREIVMELLAMIGGNRVQYGCSVLGGVRPRCELDANKIQRLKDDMDKLEGGLSDFADRFVADPIVLSRITGVGVLPQKQAIKLAVTGPSLRATGIARDLRTTMFEYDNFDYNIVTQQDGDVKSNLLMRVLESFESIKIIRQAIANIPDGKLVNNDWDMVDTEDIAESYIEVPRGTLYHSYALETGRIRHCIIRTPSMANIGAMQYACIGNHLTDGQLCIVQCDPCFTCTDRAIEVIRR

SEQ ID NO: 11551 - protein, 148 aa, Methanobrevibacter gottschalkii
MGIKSFSRARAIHVMLVYTGGCNGCDIEIVNSILSPRFDAEQYNVFLTWNPREADVLVVTGPVTHLNRKPLEAIYDAIPNPKLVVAAGSCALMGGVYKNCHGDIPSEEIEGPVDKIIPVDAKVPGCAVRPQDVLAGVVSLLPTLLDAD

SEQ ID NO: 11552 - protein, 163 aa, Methanobrevibacter gottschalkii
MRNLIKIALEGAFTNFKRIFFAADRVTDMDMKKQIATLSVEVDDRVDESACIGCSGCANVCPTNAIVMKPLAHPVKLTEGWVKDQVPEIILEKCVVCYYCHDFCPIFSLYGQKGAIHPSCVGDQEVDVSEFLEQPFKISDDKLKIIAQYLSDKTVLKNKEDGD

SEQ ID NO: 11553 - protein, 468 aa, Methanobrevibacter gottschalkii
MFLTTSTCEGKRECINQCPTKAIKFINGRAFSCLTCGICYKNCPNDAIFQNSYGGYVVDRAKCNGCGMCMYNCPTNNITIEDGIVYGICSRCGVCHEVCSNRVDGYELEKDKQLNLIRSLQILNPPLNDVPYKKESETKVVTRNYFGTDVENCILCGRCQEYCPTGAIHVKIDWDEGICSGCRLCEDVCPNDSMNKHQIVNKKSCTLCLNCMKACPHNAISVEDSSIVVNKLNQKPNGSIISCLNCGLCADLCENESHKKVDGKLRYDPTLDMENVNHDVAISHCPVHTLTEDDEMFIYDEFNDEELPILSGFCVSCGNCVQVCNEYGARQSMTQSWDGKVSEDCISCGICAEVCQEEAITLHRGSISVDLDKCILCENCAVHCPVDVIPKSTMYKNEIKDGFNFIEQKLCMHCGLCYKTCSYDAIEKINDEFVVNEENCTYCGACKNACPARAFLFERNFKDSLEGI

SEQ ID NO: 11554 - protein, 83 aa, Methanobrevibacter gottschalkii
MMLSLGPIIFGIILGVIIGSQIKLKCCDSNFTWTSFVIIIIAGIIIAWQSGNYPFYTDLPISTAFVSALIGIFVGKLLFARSK

SEQ ID NO: 11555 - protein, 158 aa, Methanobrevibacter gottschalkii
MSQSSIILKLVSLPISMILICLGIMTILGGHITPGGGFQGGAMIAGGVILSVLVYGLDNSPLEFSHLYIEVLESIGALGFIILGLIGLFVSGFFLYNVGTDLLNVVPPTIQNVLHYPDVTNAGIIPYLNIFVGLKVFVGLSAIVIAFAGFKKITEESK

SEQ ID NO: 11556 - protein, 93 aa, Methanobrevibacter gottschalkii
MSSHTTVRNLIASVMAAIFSVTLLDAVFHLSSMINAGVSNIYNVLGTKIAPNMVTVVIFDFRAYDTLGESIILLTAGLVVLLIFGRGLLGDKQ

SEQ ID NO: 11557 - protein, 111 aa, Methanobrevibacter gottschalkii
MSLYDKIFDVVKQFRKLFSPGPVTNADVSGSITAEIFLIVSLVLATILLRHISVLLAGLVILFVAVVLIINIPLIPKFKIEQEDSLDKMLFYAIVTLAIIGVVMYWGGNLV

SEQ ID NO: 11558 - protein, 484 aa, Methanobrevibacter gottschalkii
MNELIPLMVIVPLMAALIISAFSKFNKATKIFAFVIAICLPLIPLLSNYGLHYFGGYEPILDNVTNVVYHPAITYSFTFFQQIFIAMIGLLTFLVVFVYLTKYKEISGPYLFLLFLGTAAVTAMILTDDIFHMFVFFEILALAQVGIVAASSIDYSYEMALKYMILGSIGSPIMLLGIGFLLALTGSVNITDIVTAVHNGLVNAKSPVFLLSLGLIFFGWLYASGLPPFHTIKSGIYSKAEPHGAALLQSFTVISMISIVLIMYRIYSVLPIFEVLIVFFSILAMVLGVSLALTQTDFRRMIGFLAVGELGFIGLGIGLGTNFAITAGLFQALNEIIITALLFIGFGAIVEATNEVDTRKLGGLLAYHPKVSIMLLIGGLAMAGVPPLSGFQSKLMLVQASLSCGFPELSILAIMVSIATFVVFVKTFYTMFLKPKPVELDVENKEVPRAMVFVMGILLIIIVLLGLFPNLIIHGISSFVGGIL

SEQ ID NO: 11559 - protein, 128 aa, Methanobrevibacter gottschalkii
MAQTQLAILLTSVALVIVGLYSAIFIDNIIKKIIGISFIEEGANLFIVAIGYKAGGVVPIIMPGMDTSWFASNAAYPLPFGLVLTSIVIGASTLAVMLALVMVLYKRYGTLSTSVMLADTSKQEEYDE

SEQ ID NO: 11560 - protein, 77 aa, Methanobrevibacter gottschalkii
MIEFILCLITVLSAILALIQKDLLKAAILTGFSGGALAVLFQILLAPDVALTQAIVGAAIVPVFIALAVKKTQRVDN

SEQ ID NO: 11561 - protein, 140 aa, Methanobrevibacter gottschalkii
MMEYIQSALLIISAILTIISAIGLISLDKNTKDVVYARIHIVGVFDIACVIAMIAIGQYLLAGIYFILAPFIAHAIANAYWKKEDRENNLDLQNIGEDVGEDHPFLHPKEKIQALECEDSEKFKVDERFSVTTLEIEEDE

SEQ ID NO: 11562 - protein, 88 aa, Methanobrevibacter gottschalkii
MDILFVSNYIVVIALMIMMLAALRASAYESTSMGLLGSSIVVNAFAVALLIIGGLYNLEFFRDISLALIFFGFVGTVAFAVVLGGDDE

SEQ ID NO: 11563 - protein, 104 aa, Methanobrevibacter gottschalkii
MFLTRIGYGIIYFLDLIYEILKSTFDVAFNGIMRRNINPVVFDIETVLERPVSQTILANSISLTPGTLSVDLDSENNIIKVATISPRKKEDVIPFEQYIKKMLE

SEQ ID NO: 11564 - protein, 321 aa, Methanobrevibacter gottschalkii
MNLVEKLEPIIIFSAVLIGILASNINIAQHTNYLINIFLCLMIYGLFLEVNLNELKNSFRNIKFTLTSLIINFIWTPLFGYWIGSIFLNGNLDILIGFFMLIITPCTDWYLVFTKLAKGDLNLNLSILPLNLILQIILLPIYLIIFFSSKNSIDYTQIIYSILIIIIIPFITAQITKFVLITSLKERAINIISDLEIWFLSLAVFCIFSSQGKQLFENLNFLITIFLPLIIFFIVNSLVDLLISKKINFTYPEYVSLTMTTLARNSPLALAIAIISFQNHELVSIALVIGPLIELPILYIISKFCLWIKNTKLFSFHDYTI

SEQ ID NO: 11565 - protein, 234 aa, Methanobrevibacter gottschalkii
MSSYKGHSIFAFLLACMFFHNPLLISLTLIGANIPDFDHKFKKDNVYKMIILGLIIFISLYILKLPYYIGLIIVFLGITFYFSEHRSFTHSLFGVLTLTAAVSLILIWALQLITIVTTLNNHYLILAILISLLSFLFLNKKLLMVFLPIFFISLFVIKTGDIAYTEIVLSLLLGIFSHIVLDSFTPSGIKLFAPLSSKKVYKNFGLTVIFILAILSIFYHASSLFKLFEMYIKY

SEQ ID NO: 11566 - protein, 246 aa, Methanobrevibacter gottschalkii
MHLKKIGQFENLKMGYISDFSGGYISRNKDILNHLELSSLNQFILEKSVYGTPIFKLGNGGKKILVLSGIHGNELPPQIANVYLINELLNKKLTNTVYLIPFAAPKSSMNNERTFNELDLNRASHIKNSVSNLIMQAIEQLGIVAVGDFHSTSFNSNPGCESIFSSKSPSPESFLMANYISRNVGSELISFDFAGSMYKGAIEDVCNLNGIPSVTCEVLSPFGNVGRGTVETSFNQMISFLSYFGI

SEQ ID NO: 11567 - protein, 640 aa, Methanobrevibacter gottschalkii
MKKYIKRLIRLVNYERDAEIDLMTHEISTMSGKKREELGRAINKVKGKIIGKELGLQIVQFGRSERIETEISVGDMVLISTDNPLKSDLTGTVTEKGARFIKIAFDKKIPKWAMKKKVRIDLYANDVTFKRMEDNLRHLNLRGKDALEYILTERDPRKNKQIPYIDYIDKSLNDSQKQAIKNALSCENFFLIHGPFGTGKTRTLVELISQETRQKHKVLATAESNAAVDNILERLMNNKQLNLTRLGHPQRVSEHNITQTLAYKVEKHELNKKIKKIHRKIEKLIETRNTHTRPTPQFRRGYGDYDILHNASKGKGGRGISPEKMKSMASWIECNQEINESYDDIKRVENKMIRDIIECSDVILSTNSSAALDSIAKTKFDVAIIDESSQATIPSILIPIAKAKRFILAGDHKQLPPTIISAKSRDLEKTLFEELIKLYPYKSQLLNVQYRMNKALMKFPNKEFYNNGLKSDPSVEEIKIDDLLDHNHHEEALLFINTSNVYNNKEKRLKDSKSIINPVESEITINIVKNYLESGIDNEDIGIISPYADQVKVIQDNTPVEVKTVDGFQGREKEIIIISTVRSNNNGNIGFLKDLRRLNVAITRAKRKLIIVGNKETLKNSPTYKRLIEFIENENLLIDL

SEQ ID NO: 11568 - protein, 392 aa, Methanobrevibacter gottschalkii
MTEKVVLAFSGGLDTSVCVKLLEEKYDVEVITACVDVGQGEEEMERAKTMASKIGGLKHYNIDAKDEFANEYIARAIKANAEYEGYPLSTALARPLIAQKIIDVAEKEGATAIAHGCTGKGNDQFRFEAVILAMSDLDIIAPIRELNLTRTEEQEYAASKGIELSSDKLYSIDENIWGRSIEGDILEDPSNEPPEEIYAWTKSWKDSNDEPEKVTIEFEEGVPVAINGEMMPLIDLIRKANEIAGNNSVGRVDTIENRMIGLKSRENYEVPGAKLLIAAHQALEELVLTTDELRFAEYMSTLYADLVYRALWQEPLREDLDQAFDKMQERVSGEVVMKLFKGSIQPLVRKSPFSLHSIEQITFEDKETDQREVEGMIKYHGLQAANYQKLNR

SEQ ID NO: 11569 - protein, 241 aa, Methanobrevibacter gottschalkii
MSKLNQLQEIIDSSDNIVFFGGAGVSTESGIPDFRSENGIFESLNKYGKTPENIVSHSYYIDHTAEFFKYYKDNLVFKDAKPNPAHIALAKLEEIGKLKAVVTQNIDGLHQKAGSKTVLELHGSIHRNYCQICGKQYELNSVLESDGIPKCECGGTIKPDVVLYEEPLNSAVLNFSIDYISNADTLIVGGTSLVVYPAASLINYFNGKNLVLINKSETQYDNLASLVINDAIGETFSQIKI

SEQ ID NO: 11570 - protein, 238 aa, Methanobrevibacter gottschalkii
MDYVKGIFKNRPNRFIAEVEVGGNLEIAHVPNTGRCKELLVDDAVVWLKVADNPKRKTRFSLHFVENKNVLVSLYSQQANTIVYDAVIEGKIKELNGYSIYQREKTIDNSRIDIYLENETEECYVEVKGVTLIVDGEARFPDAPTERGSKHLKELIKLKKEGNRCVVFFLIQHPVGKFFRPNWENDPKFSQTLNEAYEKGVEILVYRCDNQLDGINLIPEALDFDLGKSFTDGIVNDK

SEQ ID NO: 11571 - protein, 508 aa, Methanobrevibacter gottschalkii
MMVTDYNCEYLGLSRLCLMESAGKSLAEEVGKIAVYTFAKPIKVVIFTGSGGNGGDGFVAARYLLNRGYDVDIYMLKDNIRSEDAKTNLEILKNMKPRLSRLNIFNLKTLDDINNCEVVSDETSDFIIVDCLLGTGIDGNLQTNIKRAIEVINESNGLKISVDVPSGMNPLTGVVDDLAVIPDYTISFHKIKTGVRNADEEAVGGIITADIGIPFEAEYFVNYGDFLRLKNRDSDSHKGNNGRLLIVGGSANYSGAPAIAGMAAIGAGADLVHVAAPEKAAEAIKATSPDLIVNSLEGDELSLEHGEEIIRLSENVDAILIGPGAGISDSTSKLFNLLVAKIKKPIVLDADALKQVELSLIRNREDIILTPHIFEFKSFFKVKNDLKLDIDSYDFKKVDENITEIQFITNQIKGTVIVKGKYDLILSENNFKINKSGNSGMTVGGTGDALSGIVVSLSAQGLNAFDAASLAVFINGLAGDRAFDEKGNGFSATDLVSFVGNVIKDGLC

SEQ ID NO: 11572 - protein, 377 aa, Methanobrevibacter gottschalkii
MRKITIRLLTRLPTKYVTIGLLLIIALFVYGILGSYFIMHLNIIDSIYYSIITMATVGYGDYTPHTGIQKIFATTLALSGVALLAYVFNIMLTSFQEKMSTYSKGARKMKTIEDMDDYYIICGFGRVGKVVFDELNKRKQNIIVIEKKEEICNNIEESSSVVSIHKDASEDNLISKLAGERCNSVIVSTGDDVNNLFIVLTIRETNPDAWIVTRASKVENIPRLKKAGADKVVSPEISGGQDMFFESTNPYLLRITVKHTVDQIYDEFKVINKYDCSLETIDYHIPGVETPLTREIYVTRLADGKKYYNYLQTHDDQRQALDTLYRTTNNIHSHLILGQDKESFENLIKDLKEIEEIIGINLTNEEIAKITRKEDSN

SEQ ID NO: 11573 - protein, 296 aa, Methanobrevibacter gottschalkii
MEINGVEIKDTYAEGFGIKVTRILVTAATEELAKIAATEATGYGTSVIGCPAEAGIDCFVPAENTPDGRPGYVIMICQGGKKALDHELMERVGMCILTAPTAAAFNCLESETTLKTGNKLKFFGDGFEKECEIDGRKIHSIPIMSGDFLVESEFGYKDGVAGGNFFILAKDQMTGVEAAQAAVEAISKVEGVITPFPGGMVASGSKVGSNKYSKFLNASTNEKMCVTLKGEVDSDIRDDADGVFEIVIDGVDEESVKAAMKAGIEAACEVDGVLEISAGNFDGKLGAYIMNLQELF

SEQ ID NO: 11574 - protein, 353 aa, Methanobrevibacter gottschalkii
MDKKSVFFLGISVFILIIMLWLVGIEDIIDALNVAKLELIALAIGVQIFTYALYTLRWQILNNLADINTSFKKLLPMILVGLAVNNITPSGRGGGEPVRAYILSKEEDYPMRETFATVVADRALDTFPFVVLTVITIIGMTFYFNFDLWLLIVMISAVICIVAFLLMIIYMSINPNFGKRVDGWIIKLVRRFYKKNSEELENKIHAVILDFQSTMKIVISSKKVTYYALPLSFIIWIFEILRVYIVFLAFGADISPIVIGEVFIIASLVGMIPLLPGGLGAVDGIMVVFYSVAGISASISAAATVIERLISFWMATILGMIILPHYGSSILDKISFGSSNDEIEEALENEIDN

SEQ ID NO: 11575 - protein, 477 aa, Methanobrevibacter gottschalkii
MRYITKTDLLVIGLNSGYLLIGIGIMCLIPLIFDLIYFEFDLISFILPGAISICLGFFLTKYLDEYSNKNVRLKHGMIISSLGWIWAALIGGLVFMLATNMPPIDAIFESMSALTGTGVTMYTNLEILPHSILFFRAFEQWIGGLGVVVMVISVLAKPGTATSTLYHSEAHDERIKPSTKATLEKTIEIYIIYTVVGIVLYAIAGMPLFDSLCNTFCIISTGGMNVKNANMGYYHNDLIYFISIVLMILGATSFLVHYKVIKTKGKSLLEDLQFKIIICVIAIVTLMLYYVSNIVPMELLFTVVSAITTTGASISSSLTMASWPSFVIICLICLMLSGGSNGSTVGAIKLIRLITFFKGIYRNIREILSPSGRVVPIKLQGRPLPENASEQSGNYITLYLMFIMFTWALFCFFGHDPFDSLFATVSLQGNNGLDLGIITNQIHPVLKIVSMLNMWIGRLEIYPVLITLRTVFEIFKR

SEQ ID NO: 11576 - protein, 219 aa, Methanobrevibacter gottschalkii
MDYVVIMGGGRVGLALANLLINEGYDITLIESDTKLCDEVASELDALVICGNGTNSKILEEVNIEDAKYFIATTGNDEANLLSCILVRKYNVEHIIARVSNPDHEEAFKEVGIEQVISPERAAASYLQKIVTRPNTAELMTIGQGDGEILDMTITNNKIVGKKFKDVSPTKDFMIIATYQNGTLIIPQPDNIISRGEKVSVLVKRGSFSKVSKKLENKS

SEQ ID NO: 11577 - protein, 203 aa, Methanobrevibacter gottschalkii
MSKIVFILGYNYDSNCYLIDDKILVDTGAGENRDYLFSKLRENGVEPDDIELVVNTHCHFDHIGGNYLFPNAKIAVHKLDATPIRNEDTLGTAGTAFGFDNINNSRVDIELEEGDKIADFEVIHTPGHTSGGISLWDGENLICGDTIFAGGGVGRMDIGGNYDDMKNSVEKLMALNVKRIFPGHGPIVENNGKEHIKLSYSYL

SEQ ID NO: 11578 - protein, 136 aa, Methanobrevibacter gottschalkii
MAKKGSAEERELVHKLWERNFAAMRAPASGGATKKSLPDVVAGNGKLYLAIEVKTTTKDKIYIDSIQIEELCEFSNIFGAKPYIGVRFKYTKWLFLEPDNTPRTKKGNYRVEKDYALEKGLEIDEITGIDRQMKFE

SEQ ID NO: 11579 - protein, 326 aa, Methanobrevibacter gottschalkii
MDSNIFDLIKKANEVTLNKHGDLITLERAVFLSWWCDKGDCAFCYMSTQKDKIRDPTKARRNINNIYAEAEMCKRLDWNIEFLSGGYESYTTQEIKEIATTIKDITGDGVWLNTGITDELEEYGSEIKGITGAVEVANPKIHEKVCPSKKLSDISNMLDTANDLGFKKAITIILGLGETLSDVDYIINYIQAHKIDRVIFYSLNPHKETIYANSSQPASLYYAQIVAQVRLAFPDIEIICGTWIDNLANIGILILSGANGITKFPLFKMFGTKYGKRVEEEVKWTGRKLKGTFTDKNQLGPKKSEISPELDKFIKRYVKESLKNKY

SEQ ID NO: 11580 - protein, 450 aa, Methanobrevibacter gottschalkii
MMCGLEIHVQLETESKLFCDCPTNYQDAPANTNICPVCLNQPGAKPHPTNKKALENALMIALMLNCEIDQDVIYFMRKHYDYPDLSSGYQRTSVPIGIKGELNGIRIREIHAEEDPGQYKPDRGIVNFNRSGIPLVEIVTEPDIKSPEEARNFLKELIRVLQYSGGARGEGTMRADVNISINGGNRVEMKNVNSIKGAYKALKFELVRQKNLMKRGVEVKQETRAYLESQMITVGMRMKEDADDYRFITDPDLPPMQISDETIQRILDTMPEAPHNKVKRFVEDYGIDAESAKVLTSELDLAIAYEEVVKEIEPIFASKWMRDELKRVLSYNKLDFADSGISVANLIEFLNMIQTKEITQKAAKKIIEQMPNNEKTPKAIAEELGLLGVVKDDEVLAAVKQAIEENPKAVEDYLAGQKASINFLMGQVMKLTRGKADPGETVKLLRENIE

SEQ ID NO: 11581 - protein, 268 aa, Methanobrevibacter gottschalkii
MVEKKSFVKDYMTKNVICVSPNTPTEEIIELMRTSRHNSYPVVVNDRLVGMVTAFDVVSKKWSDTVEGLMSTKLVVANPELSINDASRVMFRRGISRMPVVDENRKIVGIITNTDMVRSHIERSTPNKVEYFKKTLEQLYDIKATLRHMPVETNKLRPTQDRVYADELEGRTYELKRGLAEPAIVVKTGNRWILVDGHHRAVASSQQGYETVDSYVIDLGQDIKLGMEKTADKAGIKTFSDIEIIDDDKHPLIALTESLQDQERKSDD

SEQ ID NO: 11582 - protein, 95 aa, Methanobrevibacter gottschalkii
MNDKIIREVYEVLESRRDNPIDSYTSKIMQNSDKKAEDKILEKIAEEAGEVLIASKNDENLVYESVDLIFHTLLLLAYKGIDLDDVFDEFARRRK

SEQ ID NO: 11583 - protein, 255 aa, Methanobrevibacter gottschalkii
MFDTFTEKKFLLKELVKKDLTSKYKDSVLGILWSFFNPLLIMLVFTAIFSMLFGRQIENYPVYFLSGRIIFDFYNSGTKGAMKSIKRNANLLKKIYVPKYMFSVSTICYEFVNFLISFVILFIVMILTGATFHWTIVLSIIPMFFLVCLIFGVGLILAVCNTYFSDIGHLYNVFTLVLMYASALFYPMEIVPAIVQRIFTLNPVYSAISCFRECISYGIFPNTSTLAYLAIFSFTTLGIGLYLFKIYEKKLVLEI

SEQ ID NO: 11584 - protein, 474 aa, Methanobrevibacter gottschalkii
MNLINKIRNLFNDNTKQEKNKHIPLDAKFQSSRFKNIKIHAPDYVMSTENRYHMQILDNSNNPIKNEAITLVINGKCYEKITNKDGYASAKISPNKKKKEMKIYYLSNEEYCPCIIAKLIHPDNINPEENNENPKLYAPDMSIYSKDEPEYNARLLDSEDNPMIGETLIFNFNNQTYEKITDEEGFASIDLKLDEGTYSIETIFKGEKDSNPITKTSTINVKTRNIDRKIMIEVKHLAMEFKISKDKIDTLKEYVIRTIKRTKKEHEKIRILDDISFNIYQGERVGILGFNGAGKSTLLRIIAGIYEPTEGEVIINGRIAPLLELSAGFDKNYTGKNNIFLNGALLSMEEDFIKEKYDEIVEFSELGEHINYPVKNYSKGMRAKLGFSIATLVNPEILIIDEILAVGDIKFRKKSSEKIKSMMKEGVTVLLVSHSISQIRNICDRCIWIENGHVYMEGPAKKVCDAYVKSAKKK

SEQ ID NO: 11585 - protein, 166 aa, Methanobrevibacter gottschalkii
MILIFLIIGCCCLFYVVETSTTVGNAITVVNKTVVTLPNEFSIESRETGYGTLINKNTKEKITIKDLGKGNLALTKFKNALTDLTKNPDIDHVKNSTSNINNITAYKIDYQDITKENNSDLSNVYVFTCNHTFLIKLENYNNNVKSDNDLDYVITHMTPDFKQSQD

SEQ ID NO: 11586 - protein, 847 aa, Methanobrevibacter gottschalkii
MIKLDEIEFSVIIPTHNSELGIKKSIKSILNQTLNFENNIEIIIVDNNSEDKTQDICYDYISKYPKNISYIQLDTVNLHKSKNTAMKHAYGKFITFLKPHDYLSKDSLSHLLKFINTHENIDLAILPIFYYKNNRKERYINYKIKNNKKINLIEQPQYSQLIGLSTFFKKESIKNIEFLDTTNENITFFSEMLINNPYLGICSKGAYFAKNIEERIYPSDTTIYSTKEYEKFIKYNFNNLKNKCFNKFSKIPEFIQFSFINHLRWLLSIKKTEEKIDLKSLIDTISYINNDILLENRLLKQELTITTFLLKYNNDLSNDLMEKLDLNTLFIDIYDIIDNKIHILANIKNITTGDINILVNNKKIKFKKLTFPHKYAPSLGYNLLQDYSIECIIPIKTNEKFKLEFKQKDKLLHIDFSRPCNFSKSVGYAKTKHYLSILKDDHISIEKKTTLKWIKQELKSLKTMFKNHETGFIKAVPFRVAYMISYPFLRNKKIWFFMDRPDEADDNGLALFKYAVKQEDDISKYFILSSKNNDFNNIKKIGKVINYKSLKHRFLGMFVENIITSHPDNGIIYPFWGGYPFFAGLLRSSTMFLQHGVAKDDISYWANKANMNLSLFLTSTIQEYESILENHYNYDDYVVQLLGLPRFDNLKNQEEKRQILIMPSWRRDLNYKSKEYIKKNGFFKKFNSLINNKRLIETARENNYEIIFKPHPNVYKFIDLFDKNNYIEIDYGKTKYQELFNSGSLVITDYSSVAFDFAYLYKPVLYYHYDNDYHFNLEEGYFNYETMGFGEVVKKEDELVDLVIEYIKNDCKIKEKYSNRIKNTFKFNDKKNCKRTYDRIKEITLKD

SEQ ID NO: 11587 - protein, 189 aa, Methanobrevibacter gottschalkii
MINLRYVNFNPHIHDTYKVAELVYDVDFRTFDLLFKTPKEAISTIENDLRKHGPENTFKVILNDEMQIIGVLIMYISEKSFDLRLKSLRLILVDILDYFVLCDVKKDDLYLAELAIDESLRGQGLGRKVVLDVIDYARSKNLNRVIIDADFRNVGARKLYERIGFTIFNKKRVKIGNFERGMYNMELIL

SEQ ID NO: 11588 - protein, 253 aa, Methanobrevibacter gottschalkii
MKDILERLVDGEINIDEAERLINADNILEFNEVAKFDSKRKNRAGFPEAVFAQSKEYEDLLLIIKKYMQSNNDNLIVTRLSKERYENILNDLGENSFVFEYNRRAQILIIRKEIVEKPAIAKVGIMTAGTSDVNIAEEARVIVEEGGCEAITSYDVGVAGIHRLFPQIARMVEENVRAIIVCAGMEGTLPSVVAGLVDVPVIAVPTSVGYGVGEGGRVALDAMLQSCAPGIAVVNIDNGFGAGVFALTIVNSD

SEQ ID NO: 11589 - protein, 746 aa, Methanobrevibacter gottschalkii
MKALKILTQGIVQGVGFRPYVYRLAVDLNLKGYVRNLGNVVEIIIEGQNTELFVDRLPKELPPIAKINSMNVEEIEKTNYTDFKIIESGNSYSGISVVPPDIAICDKCLEEIRNPTDRRYKYAFNACTDCGPRFTVIESVPYDRIRTSMDEFPLCDDCSVEYEEPLNRRYHGEAICCSECGPQMEIYEGKHKINTDNPIKVGANKLKDGKILAIKGIGGTHLVVDAYNNKAIKELRKRLNRPNQAFAVMCKDLESLQNYAELSKKEIDTISSNKRPIVILKKKNNYPFPESLSPRLHNIGVMLPYSPMHYLLFDEGDIDTYVMTSANIPGEPMMIENEDIINGINDYSLIHNRRILNRCDDSVIRFRNNELSFIRRSRGYTPEPYTINYEVNDLNILALGPELDVTFSIAKDNIAYPSQHIGNTNKPKTLAFLREAIENMQRITKINEYDIIACDMHPHFFTTKLAYELAEKYDAEVQPIQHHHAHSVALSNDNAIDEMIVIAADGVGYGSDGTSWGGEILYTDIKNFERLGHLQTQLMPGGDIATKYPARMLASILNDENLIKNYSDYFKYGEIEIKNIFKQMDAGINVGKTTSTGRVLDSMAVALEICNERTYEGECSMKLESAAYYSNKNIEIPLNIENNILNTSEILKEVVKLYQDGEKKADVAAAGQNAIARGLSQLAINAASKKSIQEIGATGGVFYNEAITNTVKNYVENNGFNFIQHKNTCAGDGSVSLGQAIIAKKV

SEQ ID NO: 11590 - protein, 191 aa, Methanobrevibacter gottschalkii
MIRNDDIDNIKKNRKNVNSSNGHIEIRGNYNDQLGGIDKEDILDVMGCKTRRDIINLLREEPMFVSEISNELDIGQKAIIAHLRAMEDIGILNSSYKKILRGRPRKYYDLQNEVNIHITINRNTFDVNLSEDMLNTLQLPSGDEWSRLLDIEKRIDDGQLEAIDELKNQIRLYGNLKERAEYILERTLKNR

SEQ ID NO: 11591 - protein, 183 aa, Methanobrevibacter gottschalkii
MTDENKSETEAETQDFQEKYDELLEKLALKEEELKEVKENLEKQEAETQEYISLSQRLQADFENFKKITDKRNKEFIKFANEDIIKDFLDCYEDFGRALEIKNNDDLKEGVELIYNKFKDILTKEGIKEIPTKGEKFDLNKHEAMMVQESEDVENDYIIEELMKGYMYKDKVLKYSKVIVCKK

SEQ ID NO: 11592 - protein, 623 aa, Methanobrevibacter gottschalkii
MSDTKKEKIIGIDLGTSNSAASVLVGGKPTTIPSAEGASQYGKSFPSYVAFTPEGQMLVGEPARRQAVTNPENTISAIKRSMGTDHKVTVNGKQYSPQEISAFILQKIKKDAETFLGEPIEKAVITVPAYFDDNQRTATKDAGTIAGLDVVRLVNEPTAASLAYGLDKSEDDDMNIMVYDLGGGTLDVTIMEFGGGVFEVKSTSGDTQLGGTDMDNVLIKYLASEFKTQEGIDLMDNDQAVQRLREAAEKAKIELSTTTTTQVNLPFIAMGSDGTPKNLIIDLTRAKLEELVDSIVEKSGKPMQQALDDAKMNKSEIDKIILVGGPTRMPIVQKFVEKFIGKPVERGIDPMECVSMGAAIQGGVLAGEIKDIVLLDVTPLSLGIETLGGVSTTLIERNTTIPTKKSQVFSTAADNQPSVDINVLQGERKMAADNTSLGRFQLVGIPPAPRGVPQIEVTFDIDANGIINVTAKDKGTGKEQAITITSSTKLSDEEIEQKIKEAEMNAEADAKRQEEIEIRNNADSLIYTSEKTLDDLKDQVSEDEKTKVEDLVKELRELIAGDDVDAIKAKSDELSNVVQEIGAKIYQQAQAEAQAQQQAGADPNAGAQDKDDDTIDADYEVKD

SEQ ID NO: 11593 - protein, 381 aa, Methanobrevibacter gottschalkii
MADKRDYYEVLGVDKSADEKTIKKAYRKLARKYHPDVCDEPDAEDKFKEVSEAYAVLSDDDKRQRYDQFGHAGMDGFSAEDFYQNVNFEDIFQGFDIGNIFDMFGFGGGARSRGGRTGPQRGSDIYTEIPITLEEAFNGCEKEIKITRSELCPTCKGSKSKPGSNPETCKTCGGTGQIKEVSNTFLGQMVNVRPCRECGGTGKIITDPCDECHGRGSVRKTKTIKIEIPEGVDEGNHLRVSREGNCGDKEGLEGDLIVTVHVKKHKKFKREGDHLYLEQQISFPQAALGDVLSIPTIEGKEIEFKVTPGTQSETVYKLRGQGMNSVRHNSRGNLYVNVTVVVPKKLSSKQKELLKEFAEVSGDEIKHVEKGLFDRVKDAMK

SEQ ID NO: 11594 - protein, 1162 aa, Methanobrevibacter gottschalkii
MVLLSTGVAFAISENDVAVSNDVGIVNETVLEVSSDDSDLSEADVLETQTNVVTKDTFHNYFGNDGTLLDNVSSDELIFKGDFTGIDVSYMTIGKSVKLSGGNTTLNNVTFIIGADNVVIDGFVLDHSDVYLFDIENVNGVTLSNNIINFKTLEGTEGYAIFANTVNDFKIINNTINYVGNTKGTMVNNAIRVTGDEDSAIASKKIIVEGNVINIKIPSVDVGYDPVTWESKVFSEGIVFYYCEDVKFIDNRVDLKYNNFSGGFDTIYALSVRGNPYNFENTIVSSDIEIINNTINANGHNYIYTIFLSANDFKLFNNVINSTADFYYANGINIDGPASEGIVSNNLISVESPYDVYGIYSYQMNGPIEYISYVNNTIIGKSYVGCGMEIVECNPYIADNLIIMNGNYTFGVVASIRDNGTISNNSISSLGNNNGTDGTGDPLLPLNSLGISVKGSVLIEKNKINSGGIGLNLVEKGNITINDNNINVNTTGGVESYAIYSDKLSNLVISNNNILFTGNTNGTMVNNAIRVNGDENKKIIAKNIIVDNNNININIPSIDVSYNPVTYEATVYSEGIVFYYCEDVKFIDNRVDLKYNNFSGSFDTIYVVSVRSNPYNYVFDEEDNIIYSIVSSDILISNNTVNALGNNYTYGIYISAENFTVGDNFVNISSDGKYANGVNVDALSSNGVIKNNNVIVNADIIVYGVYSANFMGPIENITYDNNTIRVNAYAACAMELMEPNPYVFDNTIIAAGNYTFGVVASIRDNGTISNNSISSLGNNNGTNGTGDSILPLNSLAISTKGDVIIKDNEIVTSGIGVKTLKGNVDILGNDIRTTGNHTIEAINSNLTVKNNYLVSKKAVGTDSIVSDKEVISANNTPALKTIISAPNIFTEYIKGAVFPVAALDENGDPISDIVLFLTMDGIVYNVTTDANGYAAFLLNPDSGIHNVVVSFNGNEVYGPKSVNSIISVDASASKIVAKTSTTVYLTSVKSGSYFNIAVKDVNGKGLANKKVSIYFNGKTKSYTTNSLGVIKFKLSANKIGNYQLKMKFAGDKNYTASTAIAKIKVIKQATKLTVAKKTFKAKTKVKKYTITLKDNKGKAIKKAKVTIKVKGKVYKAVTNSKGKATFKITKLAKKGTYKAYVKFAGNKYYKVSSKSVKISVKR

SEQ ID NO: 11595 - protein, 1354 aa, Methanobrevibacter gottschalkii
MVKKFNISLLLFLIFISMATVCASDNMEDTLNNNGSILSNPSDESILLSNDDVLAEFTTHEINVEKYSIYFNNNGDLISSKVKSGDTLNFTGDWNEVSSKTFNFNKTLNIVYSGSKPMKNGVFTFYNGATGSSIIGLNIANTEDYNYGIFLNGASNCIVKDCFINNTGMSSYAICIANNANYNNVSNNFFCDYGMNYGGQGTRSTPPVLLSGAHHNYIANNHIECDDANGIYLSYYDGGPLHGGVSNYNLIYNNTVKYNVLPTSWGYGIQIMGGYNKIYSNRIIGAFRGISTSNGAFNEIFNNRIINITGADFNHPVVEVGGEYGIVGSANAIIINNSIENARILPGSGAIYAIDNAIIENNTIDVVSSGYGIQASGSNISIKNNSIITESGAGVFWKGEYFDLVVVGNNITSGNGVGVLVKKESVKKMPGNITIVDNYISTGNKYAIDAIEVNADTSYVIENNTIPKGKGIVATPEGSYDPSKPRYIFKGTTYSITPENYDDYFDVGGTLNSVVKNGDILYFDGNFENKGVIYINSAVKITGKNPNFYNATFRISEGVWIENLTIKNKDSERINAWGILVYNTGGAIISNCNIEVTDPNAAYAIYVVESSDIDVLNNNLTSNGNYLTYTLLAISVYDCNFINNSIHTIGTGIEHVFENSHCVDGNSNCIDGSTCVGGDTVCTSGNTITGNHVLNEVYRTYGILMAYSSGCNISGNKVNATSKLNKTSNTFNSSWGNNYHNNISTNSIVGIDLYFNSHNNTFSNNNIYVKSNDNYIYGMGVLGSNTGHDAPEGKDASNNQFINNNIVLEGDYFVQGLVIGHESKNTTLISNTVNAKSNNFSYGINLEGSQKSIIKDNNLKLTSDIVYGLEVFRSNGNFIKGNNLDIKAKQAYAIALSNAENNIILNNIVMNNVTGEEITYNVCDSLGVGVAGICLKFNSSSNNISGNNITSKKGYAIVIDKLAIKNNLFYNYLNSEMGIGDKAINNTNNNFVKGNYIYILNGLIPEVTINYLGTADIVLNVGVDGVLVKFYICGEEIGNATSSNGVAKLRYKFDDSYTPAGYSIKAIASKKDYLTKEFISYLTIEKGLLNINYNDVTAIPTSKGKFVVVVEDIFGNSVSGITVKFYRLQGRDVFIGKVKTDKNGVATLVAEVPSLGNYKLRADVVENDNFKSNSGKANLIVAYKPSIYQYKTKAVYYGNTIKYTVRVKGIDGKYVAGGKIVTIKVNGKTYRVKTDKYGKAYKSIKLKAGSYKVTAQYGVTKVSSKIKFKPILIAKNIVKKKSKKIKFSVKLVNKHGKILKYKKIIFKIKNKKYSAKTNSHGVAILSIKNLKIGKNTITSFYGGCTISNTITIRR

SEQ ID NO: 11596 - protein, 1604 aa, Methanobrevibacter gottschalkii
MYIDVKGVKITKRLDNKLLFTLFAVMFILFSLNCVFAQNNTTVTDVLSTVEDDVGIQQIQSFQVDEPLLAATNNNIQINVKHHYNETANTWDEDGYNLANATVKLYGANDKLISTHKTDSKGSVLIKNLKSTKYYVEVSYADYEPKKSKVLDFTKKSGTLKGSFDFIPDILLFVDYKSHNEKLNVLMNMSKRVAFISTGQDYDVSREWLVGYARFIHIDMFSEGAYAIFTAEKLKKLLAISPANANYNVAYTFGVYSNSILNATGLHIVGANSKNNTFNTIENTYIGSYFQAKDINLSDVLYHNMENYLKYVYYLINPSKYENPTLNDSNAPQMGPECGFYHPDLGIFTIYPEGSLINNWIKTNPGYGVDGIGSLNWMIQDYPKWFVDLLDPTTLFEQFENQFIDRFNPNKKFIAIVSYYCGGEVVDSLIRGYEEIGRPAFNVFKFSTDPSMSSILNKINNVSKIGISSITSLYSWSLSYANGSAEKDLSDIDVEILKGVNEISKYSYESELGPQVEWTYSVTYPSFEGVFSPVILSYLDEDKVHVIQSGVDKMVQLSSRWADLKDLNNSEKTIAIVLYNYPPGKAEIGASYLDVMQSTYDLLIKLYENGYAIGDIRKMMNITEFTNLLIDSGNKGSWAGGLLKKYVEKNWDELVKHNQLISMDEFIDLTSDLPDELYEEMVTQWGAGLGKSMVYTASDGKQYLVIPGVWFGNIFITYQPSRGWEEADIGEVIQNYHDLKLPPHQQYVAFYEWMDKVTKANAIVSMGTHGTLEWLPGKNIGVGSGDWSYELTRIPTIYPYIVSNPGEAMVARDRGLAMLITHMTPAIVSSELYGNYSILNNYINSYNNQIKLNVTSNANIYKEKILKLAPNLGFRKMSKGESFNHWLEELHLYLESMGDDLMTYGLHNLGKVLTGNELSEEVVTIVTSQTKIYNQIMEFLYPNLKGKDFYKDIQGDVKYLNERHTIQAFLRNYVDGLVNGSSVLDLVNKLGVNKDSSLFSSMKYAQDVIINIQNNNEWNAILTALSGGYVKAGLFADPAYGDSIPTGYDGYASDPTRMPSEAAYESAVNIVNLLLADYYEKHGKWPEMTALILWGTEISRTEGIGVAEFLYFLGCKPKWAENGKVIGVELLPLKDLKVKLHNGSVVNRPRIDVYASLVTSNKDWITWMVTATRLAANAGESENDNYVIKHYNEYPTLDRLFGLPGNILEGTGMSTLIPNTANWNISTVNVEGMNVYLDTVSFSWTIDEKGNINITKQKDTYKYLLTKTELITQNLDSTWRILDSDDYYDWFGGLYNAASILRQKAGLSRPDTSFVDIRDKNKYVTRTYEEEMEFEIRTTLLNPKYLKPLKGTAAGMNWIASRMQNTFGILTISGNKLNKELGNQMSNTLLDLASGVRDASTSYGIQSAIAHMIYLATQGTWDADSETLQKLADEYMRQVLKYGVACCHHTCKNLDFNNKVIQVSSLTPAQKAEFAKILAQATNTDPLYEVEKDSANNDNNAQGIVNGTTKDKQSDSESGDKTSFGGDSSQAGDAKSASQSQDSSDSSGDSGADAYELSQQSASKSTSGAESSMPIFVIIAIIILIVIFLVGYVRNQKDEDFDDY

SEQ ID NO: 11597 - protein, 280 aa, Methanobrevibacter gottschalkii
MHKNSIIIIILSITIIGMLIPAGFSANDYQIVITYGETTKNNAEYKNTVDSFFENQAHMDLKGVNSKIITANEVNKISSTITGKSYNSNQIFSSALVDLGDNDNLKVSVDKSKITTITGDMYLSALKSAGITNGHVYITSPVTATGESALAGIMNSYEVATDVEIPAPVKEAANKEIYTQAEIVKESNVSADDLSNLVDDVKETVKEENITDYQTIVNIINNTTINYNINLTYNDIENLAESIEQIQNVQGDINSYQTEVNDVLNTTDTSNTGFLDGLFN

SEQ ID NO: 11598 - protein, 107 aa, Methanobrevibacter gottschalkii
MEHITYDDVVEYNHLFTLVPSFVLEKMAKKNSNLVDKFESAIQSHINDLTVEQRIKLNIILDSDVSELQDLMYNAYMRTNKKQYQILANPKYKQFIELNLGELRKII

SEQ ID NO: 11599 - protein, 176 aa, Methanobrevibacter gottschalkii
MDAIEAVAILILVVAIFILVYYYLLNSPSSMDKLKNIVPESADAHMDEVLGKNNVDSSYDLSKEDVLGDKEESESMGKRIKVKLSDIDGSTINTSAFSHKLDAFLDQKSDQLIKDWSLATTNDLDNLQAKFDETTNNVDTLEKNFNEFKQSSEEFQKITGERLDDLDKRIESLENK

SEQ ID NO: 11600 - protein, 136 aa, Methanobrevibacter gottschalkii
MEAIPTIPDQIFYLIILVIVAIVLIVIVFQWKKVAQSKNSILILEKEIELKKMSMVEKDIESKRLMDNPIPLPQEQQDSLSAIRQSTTEVRSNVGYLHSEINERLARLEAETEQRKLEKMLKEIEAKEKKLSKMNK

SEQ ID NO: 11601 - protein, 305 aa, Methanobrevibacter gottschalkii
MMESYIKAGKIVSKIRSEASKMIVDGALVIDLVNYVESEILKTGAEIAFPCNVSINEIAAHYTSPIRDETAFKAGDMVKLDLGAMVDGCIADSAVTIIANGNIDENYSQDEINLHEEIQEASAAGLEAAIATARAGIEVSKIGAAVHEAIAEYHLNPIFNLTGHSLEQYNLHAGISIPNYDNHDNYILEEGQAIAIEPFATNGEGIVNDAPGHYIFSYMANKPFRMKSTQKVLKYIQHNHRDVPFSGRWITNEFGERKGSIALKQLSESMAIYPYAPLREKENCFVSQKEHTVIIEKEGCTVTTI

SEQ ID NO: 11602 - protein, 283 aa, Methanobrevibacter gottschalkii
MPLGNYKEAISARATEKKILDVSQDGGIVSALLCYALDEGKIEGAVVAGTPDDDWRPVPTVVTSSDEVIANAGTKYSMSPTLAVLKEATRQYGLEKIGVVATPCQIQGLRKAQAYPFTRFVVNKINLIIGIYCMENFPMASLDTFATAKLGFDKLTDATKMDIGKGKFWLTKDGEDSGLKLKETHGYEQSGCNICTDYVAEWADISTGSVGSPDGWSTVLTRTDDGNSIFKEAVSAGLIETKPVDDGKFGLPLLEKLAKGKKDKNGAEFERRAKMGVRVPTIY

SEQ ID NO: 11603 - protein, 280 aa, Methanobrevibacter gottschalkii
MFDKLKKAFGGSAEPAPKVDEKVEEVAPVETKAPAEEPKAASSKPRIGYIHLSGCTGDAMSLTENYDILSTVLTDMVDIVYGQTLVDKWIHGTYAEEMPEMDLCLIEGSVCLQDEHSVHELLEARKKAGLIAAFGSCAITGCFTTYSRGGQQAQPSHESFLPIGSLVKVDVALPGCPVAPEMIAKTIVALCEGDLDYLKPAMDWAACDKGCGCDVLTNVVRQGLCTGCGTCALACPTRAMGFSEGRPSCDKDRCIKCGSCYMMCPRSWLPEGRIKKETGL

SEQ ID NO: 11604 - protein, 189 aa, Methanobrevibacter gottschalkii
MPYDSDIIVIGCGNILFKDDGYGPIVINLLQKYFNDKNDYYDPAVTSYVEDEFDKNVLNQIKEKFEGVTLPDSVQFIDGGTAAPMNFFPLYKEYDWKKLIVIDVVESNAEPGTVGIFDPNAMQVGKYDNPHGMTVEEPLQKISEKCEVVIVGCKPASIPIPDIDVGLSESVEKAIPEAIDIILKEIGVK

SEQ ID NO: 11605 - protein, 404 aa, Methanobrevibacter gottschalkii
MKDRVVISPTTRQEGHAELVMEVDDEGIVTKGMYLSITPVRGLEKMVLDKAPESAVVLCQRICGVCPIPHTLASAEAMDMALGIEIPKNAKLLRKATLAAHNINSAAIHQFLIATDFVPENLFATAVDSVSEVRKTVQYVVDMIAGEGIHPSDVRVGGMARNITPFTKERLIERMTALRPKLEEHIELIKNCVVEKGLPDDLGVINRPLMATDATYGTNDFDMDVFSEVLPEAWYDDPEIGKKACSVIPLINGENVETGPRARMEKFAGFKGKGVNAQHVARADEMLKNYDACMEALDAIDPAAPAKVSYDKRGTGELGFGVIEGPRGTNVHMAKVVEGKTKFYSAIVPTTWNIPTMGPATEGFHHEYGPHVIRAYDPCLSCATHVMVVDDEDKSILKNEMVRI

SEQ ID NO: 11606 - protein, 175 aa, Methanobrevibacter gottschalkii
MDKANIIISIIIVLCVAAAVAAYGITNSDNPIFSDLSSMSANDNDAGNGIGNNTVTGNGSGNTIATTSGSGSGSSSSSSSGSGSGSGSGSGSSSSSSSGSGSGSGSGGGSNSNSRTHLSYSEAKSIANDAIEEAGCYAGSGSYSGGYWYFTVYDANGNNVDTISVNDNTGATGRG

SEQ ID NO: 11607 - protein, 392 aa, Methanobrevibacter gottschalkii
MLVNADFHVHSCFSMASSKDMLIKNMAAKSKLKGLNLLGTGDAFHPNWLDMIEESTVYCGDGIYNSDDMNFVLTTEVEGRNRIHHLIIIPNIDIARELSYKLPSKNKKIDGRPKTNLSGIELLELVRDYDCLIGPAHAFTPWTGMYKSYDSIYDCYEKRVDFVELGLSADTFMADRISELKDFPFLTNSDAHSPWPHRLGREFNQIELKDISFSSIKNAFKHNKIKANYGLVPNLGKYHMTACTKCYNLIDPMIAHENKMKCSCGGTIKKGVDFRISEIADYDKPKHPAFRPKYVHLMPLAEIISSVYEKGVTTKTVQGKWQKLIDNFGTEIDVLINVSLDDIEKIDLNIAPAINAFRNGEINVIPGGGGKYGQISFDKIKKQDKIVTLDNF

SEQ ID NO: 11608 - protein, 256 aa, Methanobrevibacter gottschalkii
MNTAEINILKEIELENPIFIEALPGLGHVGKLAADHMIDELNATKFAEIYSPAFPPQVLIKEDGIIGNMLNELYYLKDVGEDNLDLIVLVGNTQALSPEGQYLVCKDILDFVKGYGITRMFTMGGMAIPQPVENPKVYGAASDEATIELLKEAGIEIRSNDGGIVGASGLFLGLGIRQGIQGACLMGETPGYFIDAESAEAILKKLSLLLNFEINTDKLDERAEETRQMIAKAQQMEQDLINKANTGNADDLRYIG

SEQ ID NO: 11609 - protein, 53 aa, Methanobrevibacter gottschalkii
MKMNKCPECGIYTLKDSCPKCGGKLKVIYPPKFSVEDKYGKYRRILKKESMKE

SEQ ID NO: 11610 - protein, 266 aa, Methanobrevibacter gottschalkii
MVRKSQEWPDEGELIVGTVYKVLNYGAFAKLEEYQGKEAFIHISEVSSGWVKNIRDHVRENQKIVCRVLRVNPKKGHVDASLKRIREDQRTKKIQHWKIEQKAEKFLELSAKSLDKSLDDAYDEVGYELMDIFGDVYGAFETASEEGAGSLTEEGIPQDWADAITEVAQRNITPPEVHISGYVDIETFVPNGVEIIIDALKAAEDNGDEEEEIKVQCVGAPRYRITVKSTDYILAEKALKAAADRCIAVIEESEGNGSFLRELDNN

SEQ ID NO: 11611 - protein, 59 aa, Methanobrevibacter gottschalkii
MVSKGRGNFLKVKCLDCDNEQVIFDRAASDVKCIICGKTLVKSRGAKAKITAHIEKVLN

SEQ ID NO: 11612 - protein, 92 aa, Methanobrevibacter gottschalkii
MKIPKEKRTYCPHCKKHTMHEVHTAKKRKASELTWGQRQFRRVTAGYRGYPRPLPAGNKPVKKLDLRLKCKECGKSHIKQSFRTGKPEFVAK

SEQ ID NO: 11613 - protein, 291 aa, Methanobrevibacter gottschalkii
MDQFYQELRKIQKKERNNGTLARVDENFYASIHEYLDELRQEAIRDPFSNIHGMLKEAQIIATEICERREHKITDAAVVNIHRSYRLFTGKPKFDLVDTTPLNLTPEEEKFYFSLLDTLKNHRGNISLEKLSDDDEFVKPKETQTNTLVPKHDEIKPKVSNLTHDNESEDEVLNRLDEISRAKPLKKEPLEPKIESKTMSIPKTQAGNIPEKSIEINPNAFDKQDEFYDLESKKLARDTELVTMLVFDEINPIVGVDEKVYGPFRPQDLVTLPLINAKVFFKNRKGRQIKI

SEQ ID NO: 11614 - protein, 244 aa, Methanobrevibacter gottschalkii
MFKAELSDSSILKTSFDAISSIVDEVQIQTDSEGMRLDALDRSHITFVHLELKSSLFDEYVCDVPEKINIDTDEFMRILKRAKSQDRVLMSLDEGNFIITFEGDATRTFKIRLIDMEYDNPVPPQIDHPTKFKVRFSILKDCINDIDIFSDKIALQVDEDYFMASADGEFGDASIKYLHGENIQEHAKSLFSLDKIREMLKADKFSEEAEISLGNDMPLSLTLNMVTGDGKLSFLLAPRLETDD

SEQ ID NO: 11615 - protein, 257 aa, Methanobrevibacter gottschalkii
MSKIADAFKNGTAFIGFLTAGDPTIDKTVEYILAMEEAGCDLIEIGIPFSDPMAEGVVIQDANVRALKHNTTADDVFGIVKRVREKTDIPLVFLTYINPVFFYGYEEFFKKCGELGVDGIISPDLPYEEKGEIKDIALENGVDVISLIAPTSSERIKMIAGDATGFIYVVSSLGVTGMRSEIKTDLNSILKDIREVTDLPLAVGFGINTPKQAEDISKIADGVIVGSAIVKIIEEHGENATKYLKEYVSCMKKACNK

SEQ ID NO: 11616 - protein, 394 aa, Methanobrevibacter gottschalkii
MSKGRYGEYGGQYISETLMNELIYLEEQYNHYMSDPGFVEELDMLLKEYAGRPSLLYYAERMTKDLGGAKIYLKREDLNHTGAHKINNVLGQVLLAKKMGKTRVIAETGAGQHGVATATAAALLDMECEVFMGELDTKRQALNVYRMELLGAKVHSVKSGTKTLKDAVNDAFRDWIARVHDTNYVIGSTMGPHPFPMIVRDFQAVISAEAREQFLEKEGRLPAAVVACVGGGSNAMGAFYNFIDDDEVKLIGCEAGGKGIDTPYNAAALTKGKIGIFHGMKSIFNQSNYGQIAPVHSVSAGLDYPGVGPEHAYLRDIGRAEYVPVTDEEAVTAFEYLSKMEGIIPAIESAHAVAHVMKIAPLMDKEDIIMICLSGRGDKDVRSIAEYRGVELNE

SEQ ID NO: 11617 - protein, 199 aa, Methanobrevibacter gottschalkii
MVKIKICGIKRLEDIEIVNKYNPDYIGFVFADSKRKISHDLAKRLKDNLNSNILSVGVFVNSSKDEILGLFNEGIIEIAQLHGNESEEYIIDIKERTNYELKIINAIEMSQDIDLLKYDKSLADYLLLDSGKGSGKTFDWQLIRNDLKKNFFLAGGLNIQNVREAIHECNPYAIDLSSGLETDGFKDEMKIKEIMEVIN

SEQ ID NO: 11618 - protein, 258 aa, Methanobrevibacter gottschalkii
MLCEIVEKTKERVEQAKKSIPLDEIKKEVSSMEMTDEFPFKKALMEDGISIIAEVKKASPSKGLIAENFDHVNIAKDYEQAGASAISVLTEPFFFMGSNEYLSEISENVSIPILRKDFVVDEYMIWEAKLLGASAILLIVSILDVVQLKKYLNLAHDLGLSVIVETHDADEIRMAMIVGAEIIGVNNRNLKDFTVNIENSINLRRCVSGDVIFVSESGIKTKDDVTKLKENDVDAVLIGETLMKSNDKRSMISELKNG

SEQ ID NO: 11619 - protein, 335 aa, Methanobrevibacter gottschalkii
MIKEAILKVYKNQDLTHDEAFQTMDEIMSGEASEVQMSAYLTAMSMKGETITEITASAEAMRAHCVRLLNDREVLEIVGTGGDGSNTFNISTTSSIVISAAGVPVAKHGNRSASSKCGAADVLEQLGVNIYIEPEKSIKCLEKINLCFLFAQNYHLSMKYVANVRKELSIRTIFNILGPLTNPAGATMQVLGVYEKELAEPLIDVLKNLGVSSAVSVYGMDGMDEISASDKTFVCELKDGKTMSYEISPELFGMELASKDDLVGGNARENAEITLSILKGEKGPRRNAVLLNSAAGLYVAGKVESLRDGVDLAAEVIDSGKALKQLENFIEFTNS

SEQ ID NO: 11620 - protein, 194 aa, Methanobrevibacter gottschalkii
MILLIDNYDSFSYNLYQLIGEVMKDIQVYRNDKITVEEIKDLAPEAIVLSPGPGKPENAGICIDVVKEFHDKIPIVGVCLGHQAICAAFGGNISHAKRLMHGKSSKISLHYDFIFKGLPSEISVGRYHSLSLIEDTLPDCLEIISKAKDDGEIMAVKHKEFNVYGLQFHPESILTPDGLTIIENFAEKVERGIL

SEQ ID NO: 11621 - protein, 507 aa, Methanobrevibacter gottschalkii
MMMKILSDTMFSPSLEEVIEIGKNEEYKRIPISYELFSDIATPIEVLRILKGISNHTYMLESVEDSKKWGRYSFLGFDPLLEVTCHDNMVHIRGDKEFNELTDEETIIETNVPSDVIKDLVSKNKSPKLEYLPPFTGGFVGYFAYDYIKYSEPSLNLDAENQDQFKDIDLMLFDKVIAFDNFKQKIIIIINMKTDDLECNYKKACENLKNIANLIRTGKKAEIQPLNLKSEFTPVFSREKYCEMVKKAKEYIYEGDIFQVVLSNRIEADISGSLFDTYRVLRTTNPSPYMFYFSSNDIEIAGASPETLVKLTDNQLYTFPLAGTRPRGKTEEEDLMFEKELLADEKELAEHNMLVDLGRNDIGKISEIGSVSVDKYLSVEKFSHVMHIGSTVSGTLRSDLDSLSAIDSILPAGTLSGAPKLRACEIINELENNKRGIYGGAIGYVDLSGNIDTCISIRIAFARNNKVFIRSGAGIVADSVPDNEFDECLNKAAAVINALKIADGGIL

SEQ ID NO: 11622 - protein, 133 aa, Methanobrevibacter gottschalkii
MDLRKIGILLIFVGIFVTIFFINDDKLFVPALTVTVLGFFVTVVGFVIEIRKQKIKNDRLEKDIESILQPLITEYSNLNKQYRMDFQGDEYTQKRIQLNRDLEKEITDKIPYLESREIKKIVIQFSQEQDKMN

SEQ ID NO: 11623 - protein, 258 aa, Methanobrevibacter gottschalkii
MSSLNEKLKLVTLKGLLIFIFFIFLINVLLGSLNLIQINNAWIYIFVIFYFIFKLREGFSSFKHDFLKVFTFESLKIISAIVILNVFISYGLLYLSDFILNVFPNLNSIVMSSEYINNSLFVFYGVITTVFISPISEELIFRGVLLNRLNLIIPLDFSIVITSILFASLHSFGSITAAFIFAVCMAVLYLRTDNILVPIFAHFLNNLIAEIIVIADVGNMLFTNNVVMLIMSVLAIISTFLILILIKKQWNILNINKL

SEQ ID NO: 11624 - protein, 67 aa, Methanobrevibacter gottschalkii
METRIRKFRQEKGMTQQHLAELVGVTRQTINALENARYNPSLLLSYHITKILGKAAIEDVFIFNEDD

SEQ ID NO: 11625 - protein, 449 aa, Methanobrevibacter gottschalkii
MAIHPIEFRYGTPEMKNIWEEENKLQRMLDVESALAQAEGKLGIIPQEVADEISSKANTKYVKLTRMKEIEAATNHDIAALSKSITEVCENGAGEYVHFGATSNDIVDSSNSLLIKDSINVLKEKLEKLTKIMLDLASENKMKVCIGRTHGQHALPTTYGMKFALWADELHRQYDRLEHAESNVCVGMMDGAVGTTAALGEQGWEIHKTVAEILGLPAATITNQVVQRDNHVEFISVLANIASTLDKIGLEIRSLQRTEIMELGEYFDPEKQVGSSTMPHKMNPITAERICGVARIVKSYVNAALDNNPLWHERDLTNSSCERIMFPESCILTDYILNLTIKLMSNLVFYDENIERNLNFTHGLVMAERLMAELTRAGMGKQTAYGIVRKNAIKANKEKLLLGELILEDEEVKKYLTKEDVDKIMDPHTYTGSIPTIIDELLEKSKEWF

SEQ ID NO: 11626 - protein, 830 aa, Methanobrevibacter gottschalkii
MAYLKRMDLPIEGMHCASCVLSVNKTFGKIEGVEEVDADLAANRLHITINPKKISYEEMERLVKNLGFELHSDEMTLRIQGMHCASCTMNVENFLIRVDGIFDVKADLTSQTAKIRYDSSKLDMNEVEKVIESLGFELLGIEGQTEIDEEAIYQQDLKDKLTRIIVGVVFTAILMILMFSGWDPLMGPIASLNQVTGLHISAMGLLSLIVSIGPFIYISLPILKAGWNGLSHKNLNMDVMYSMGIMVAYVSSIFGTFGIVLDHTFMFYDSAVMLPAFLMIGRYLEARAKKRTSDSIRELIGLQPTVAISIEVDENGEITSQKEVSIADIVLNDLLLVKPGEKIPVDGDVVGGESCVDESMINGEPIPKVKKDGEEVFAGTINQDGVLYIKAKKIGKETVLSNIIRLVEKAQSSRPPVQKFANTIVSYFIPVILTIAIVVFLIWYFVLGETLLFSLTCLISILVVACPCALGLATPTAVTVGVGRAAEFGILIKNGDTLENAGQLDVAAFDKTGTITEGKPEVDDIIAYATSEEDLIKLVASVEQNSTHPIAKAIVNKAKELNIELDQTTSFENVTGKGLKAEINSKEILAGNLALMESENVEVSSKLADKYYELEKLSKTIIFLAEDKTVKGILSLSDKIKENSRRTIEELHKMGVQTYMLTGDNESTALNVAREVGIDNVKASVLPENKLEIVKDAQSNHTKKVLFVGDGINDAPALTQADIGVAMGNGTDIAMESGDVVVMEGDLENVVAAIQFSKKVMRRIKENIFWAFAYNSILIPIAAGILYPAFGITFEPALAGLAMAMSSVTVISLSLMLKRYVPEIKRKSNI

SEQ ID NO: 11627 - protein, 263 aa, Methanobrevibacter gottschalkii
MKLIIDTELCTACKLCSQVCIRDNIYVDDFAVEMGDNCFECGHCMAVCKVGAVTLKSFIGHEDRIQEYNSHEIPVKYDDLLQLLKQRRSIRWFKNKKVDKKTFEKLFEGAYYSPSAQNEQDVEFVVLDEKLDEFMDVVYDIIKVDEDKFFRIKEFGDYLKDNSKKKFHPLLWEGKQLILTFSTDKNNAVIANTRLELLAYSLGLGGFYSLFILKADEINHDKLMEFFPDIDKNKHMYSTFIIGYPKKRFRRTIPHRDITATYY

SEQ ID NO: 11628 - protein, 404 aa, Methanobrevibacter gottschalkii
MQTLIENVNIVNPGDDIKTHQNILIEDALIKEISQDKLSTKDNVKIIDGEDNYLLPGFIDCHTHIFAKGFHKEENMTNPLGIHFYNAVPHSLQTIDAGVTTIRDCGSADLSFKLAQQRKLFTAPKIHLSVTPLVITGGHFDLLLPSGWDMEIMYPGFPKGRCDGVEEVLKKTREVKRAGADFIKVMCSGGVLTTNNSPEFAQFNKKELKTIACEANANNMSVSAHCHSLKGMNNCIDVGFSSIEHGTFIDRKTACRMAENDVSLVPTLLVHQFLYKNGFPAWDNYAREKTAKLKEIVKVHKENIAAAYEEGVNILMGTDSGVIPHGHNLEELIHLTDIGMSESEAIASGTVNAAKFLGNDDLGKVRKNCIADLVLVNSNPFDDISILSDNDNILTVIQDGIVVK

SEQ ID NO: 11629 - protein, 129 aa, Methanobrevibacter gottschalkii
MITCRNIAKGKGKGELIVSSEPISFLGGVDPETGIVIDPTHELKGECIKDKVLFIPGGKGSTVGSYVIFQMMKNNTAPNAIICLNAEPIIATGAIMSDIPMVDSPAQTKDLTNGTLVEVDGDNGTIEIL

SEQ ID NO: 11630 - protein, 421 aa, Methanobrevibacter gottschalkii
MIIMLNANTYVTAQEGIGGTIRNQYEDFYVEEIPEIIPDGEGPNVYVWIEKLGRTTLDVVLDIARDLHISRKRMGFAGMKDKKAITRQWICIANMDSEEQFKQVEALDIYKTDFLKTVRGRKKLRMGQLRGNKFRILVKDLKDIEKSADVANEVLDELQHTGVPNYFGWQRFGKPRTITHLVGEALVENDLEKAVGVYIGNPQEDESEKNQKARQAYDDGNLEEAFNLMGKGMRYEKMMLKELVKASKKGELTDKDYMNALHALPKPLQRMFVHAYQSYLFNEAVSKRVEMGINKYIEGDIIIDTEEHIVRDKTPEEFQELIDNFQASPTCPLYGTKVPFAEDAVGKMEEDILTNYNITKANFEVPKMPRLGSHGLRRSMRFKVWDASATATDEGVLCEFSIDKGSYATAVLREIMKKDVI

SEQ ID NO: 11631 - protein, 145 aa, Methanobrevibacter gottschalkii
MLDEKGYFYIIDAILAVILVSIVFLVVNTAISIPSPDYSYDSCEFRTAQDVMEILSGKVNFTDRTFIGEISKILKDNKNSKESINLVSKICKNKFKSLNLTNYRFTENKILKEKILDSSGDYSKSNMVSVATRNYDDYSYTLSVW

SEQ ID NO: 11632 - protein, 454 aa, Methanobrevibacter gottschalkii
MDIEGFVRARIDDYDYNDLTELLAVRIREYKKISEKNSVEMAKAVIDEVSTTLKLQECGDEFLKEIANVNKADVLMGEMGVGSRGAGDFFVHRKIAEIVASTNTASLINPSEQDDGGVVKAKANNDDVYITTAVDGIHSRLSEYPFLGGFHVTRATLRDVCVMGADPVAILSDVHLADDGDVAKIFDFTAGVAAVSELVDVPIVAGSTLRVGGDMVLGDRFVSAVGSVGVSNHPPTARKGATDGDVILLTEGSGGGTITTTALYNGFFDVVWDTMNVNFVQASHALFEADLVKDIHAMTDVTNGGLRGDAHEISNTTGVGLEFYEKEIRQMVAPNVLNMLETLNIDPLGVSTDSLMLIAPPEIVGDIKKVVGKYDVSISEIGEVNTSGEPILIKEDSSEEKLVPLFREAAYTKIKKLVGETTPEDFEEMKEKVQRASDAAIAKKEKVINHIRAN

SEQ ID NO: 11633 - protein, 198 aa, Methanobrevibacter gottschalkii
MITIIDYKSGNLKSISNGFKKIGAEYKISDDKEVIANSDYLVLPGVGAFGSAMENLKPFRDVIHEHVSEDKPFLGICLGQQVLMSSSEEADGVKGLDLFKGHVELLSGDVKIPHMGWNKLKICNNSPILEGIDGEFFYFVHSYHVVPDDESIIAGVCEYGGKIVASLSQNNLFSTQFHPEKSGIAGLKILKNFTNLEL

SEQ ID NO: 11634 - protein, 357 aa, Methanobrevibacter gottschalkii
MHPRPSPIAASLYTLRDMNVDVIVMHGPNGCCFRTGRLLESDGVRVLTTAMAENDFILGAGEKLEETLKKAYDMFKPELMGVVGTCASMIIGEDLKEAIANADLPCTVIPVESHGGSGEGDNTVGAIMVLEAAVECGVIPQGEADRQIEMLEKATEVEKTRGMAQGKYIKPNFGDSKENVAKLVVRAIKDGKKVAFVHNAKKETAYLFADIINFDYKDIRRDNKPIIVANLDGSTGLERIRCHAKNIKEELPMEIDFITGGLDEYPITADVAAEYLKNMDLDLIVVFGVPHAFPIEDFDVESVAITDGPRLVEPLRDLGYNHVVAELDAHSKTLGTDEIVFSDFGGMIRSAIGWLDE

SEQ ID NO: 11635 - protein, 133 aa, Methanobrevibacter gottschalkii
MMKLDKKILEEKIREYRDFKSCSESTLMGLCEAAEYPMSKAEMCKIACGFAGGIGGTFDEGTCGAVTGALIANGLVLDNPVKIKENAKEIFNSFKEKYGTVCCGKITNNGKDKSPCVDCCVFIANKVADLWDE

SEQ ID NO: 11636 - protein, 161 aa, Methanobrevibacter gottschalkii
MDEKHLPLFGVGPYLMGLIIIITFLSIAASIYKIIPVYNINKLNIFLITLGIISIIFAIVLWLLAILNSKLMKNIKNNNLVTTGVYSFVSHPIYACFLFISIGLILISQNILLFFLPFLFWAFLTISLIKTEEKWLFERYGDEYIKYSKKVNRFIPFKKIF

SEQ ID NO: 11637 - protein, 301 aa, Methanobrevibacter gottschalkii
MIETIIIIVIFLVYIAMKYVKILRPYEKGVVERLGKYNRTVSSGIVVLIPFLENLERVDLREQVVDVPPQEVITKDNTVVVVDCVIFYEVVDPFNATYNVVNFYQAITKLAQTNLRNIIGDLELDQTLTSREMINAELREVLDEATDKWGSKVVRVEIQKIEPPKDIVEAMSKQMKAERMKRASILEAEGYKQSEIKKSEGDKQAAILEAEGKAESIKKMAEAKKQALILEAEGESMAIEKVYAAIHEGNPDDGLIAIKYLESLEKIADGKASKIFLPFESSGVLSSVAGIAELFKEDKKE

SEQ ID NO: 11638 - protein, 135 aa, Methanobrevibacter gottschalkii
MEIFIWIILAILFFLLEILTGSFILVWFGISSIVAAVLNYFKFDFYTQFGAFIVISIILLVFTKKFAIKVTPEINKKTTAERLIGRNAKVVRKIDDKNIIVKVCGEEWSAYAKNNVDIGDTVKVCGIESIKLIVE

SEQ ID NO: 11639 - protein, 71 aa, Methanobrevibacter gottschalkii
MGIIIKSLKYFIYLQIEAFNHEFFRWPKRMEYWKKALSIIIFFCIGLILMDMIACGDLPDKNTASSFMFYI

SEQ ID NO: 11640 - protein, 104 aa, Methanobrevibacter gottschalkii
MKKVKITVMRKVRHDDLIEEYENPLEHECSVEEGQVFIANGWARPDDFCDSAWESLSPFVMALANGASDFYDGWMKNKKSAMISCNDGFRPVSFLLETLDEDAD

SEQ ID NO: 11641 - protein, 396 aa, Methanobrevibacter gottschalkii
MLQIAVCGKPNVGKSSFFNSATASTVEMANYPFTTIDANKAVAHVIKDCPCKELEVTCNPHNSICIDGKRLLPIELIDVAGLVPGAHEGKGLGNKFLDDLMQAKVFIHVIDASGSTDIEGNPVDPGSHDPLEDIQFLEEEIVMWMYGILSRNWVRLIRKVGAEHLDISKVLFDQLSGTGITIEDIIEAKRNIEPDYNKWEEKDLIELTRNILRIAKPMMIIANKADLPTSAANIERIKEKYPYVIPTSAESEIALVRAAEAGLISYISGDDHFEILQADKLNPNQLKALEYIQTNILDKYGSTGVQKALNYGIFELLDRIVVYPVQDEHKYTDQKGNVLPDGFLVPNGATPRELAYIVHTDIGDKFMHAVDARRNMRVASDYELKDGDIISIVTRG

SEQ ID NO: 11642 - protein, 289 aa, Methanobrevibacter gottschalkii
MKNYDTDRPPAMKIRQGIQDAMTYSLPDKKFEPSEIDLVEVDIKLNNLGWNFHNFKILNLTDIHLGQWINPEYLDELIDYVNILNVDLITLTGDYFSYITEGYEKSLTDSFKKLKSRYGKFGVLGNHDHWMDASKIRDIFKSSKIIDLSNKVYTLEKEGEFLNICGVDSCTVCADNLDEVLVKIREDTPSILLAHEPDFAEESSKTNKFDLQISGHSHGGQFIIPKFETTPFRGPNSKKYPVGLYKVRNMIQYTSKGLGTNSFRMRINCKPEITIITLKTNRKQKIDVK

SEQ ID NO: 11643 - protein, 706 aa, Methanobrevibacter gottschalkii
MNTHNIITSTKNIINLILLVLLNILVIILMSDLYGDFSIGPWYNAFFIVLSITIANTLLWPIFKRFFMKFMIQTLGIGTIFINALIFYIACYFIPNVDVGFYASIKVPFFMSIATTVVTNMTNTNYYNRHLKNIVKYALNKKIDSKSYPGIIMLEIDGLSINILKKAIDNNIMPTIKEWIDSSTHNLKEWETDLSSQTGASQAGILHGNNENIVAYRWVEKENDNKIIVSGKLSHAPLIEKRISNGEGLLVDGISVSNMFSGDSKSAPLTSSKLGTLTRINHKTLNTVFLDTYNYQRIFTLFLWDILVELKSQIKHLIKNIQPRLRRTVVYAAVRAGANVVLREVTTDILTSEILKGEIDTAYATFMGYDEVAHHSGTQDEDVWPVLKQIDTQIQRLTNAIDMSNRGYKLVILSDHGQSNGATFKQKYGITLGNYVRRFLPDDLKVYRNEFNIDHFRDAVFSENIKLKIVKEKIGDFRDDIFDENTYFQNIRDELENKKPAIIFDNEQYQNLRKKYSNSLEYIKGHESIEQSTKKAKDSELIVLGSGNLGLIYLTEWKQRLTYEEIVMLFPELIPGLVKHPGIGFILVHSITNGGMVIGEDGIYYLDTDKIIGENPLINYGKNAARHLKRQNTFNNMPDIMVNGFYDEKYDEVNAFEELIGSHGGLGGDQTKPFILYPSEWEDPGKLIGASSIYEFLKKEINELKS

SEQ ID NO: 11644 - protein, 283 aa, Methanobrevibacter gottschalkii
MDNFKQRLNKSKEAIDNADYIIIGAGAGFSAAAGILYSGKRFEDNFKDFIEKYDMKDMYSAGFYPFKTQEEKWAYWCRHVYVNRYSVGKTELYKKLFNLVKDKDYFVLTTNVEHQFWINDFEDKRIFATQGDYGSMQCEKGCHDKLYSNEDFVYESLGKIEGCRIPSNLVPKCPVCGGNMDLNLRKDQFFIEDKKWHEMASNYQNFLSRIDEDKNIVLLELGVGFNTPTIIRYPFEQMTYNNKNMTLIRLNRDYPDAIDQNKDRTISFDEEIYEIFDYWLSRF

SEQ ID NO: 11645 - protein, 213 aa, Methanobrevibacter gottschalkii
MQTGKIFIIGIGPGASEYLTKKAIDTVKTSDYTIGSTRAIELFDDVQNKIAFNVKELLEKLNEGVQLACNGNTVSILSTGDPGFSGVLNTVLRISKEKEFPNENIEVIPGISSLQLAAAKCHIQWDNANVMTFHGRENIEDILPVINNGKTTIALPSRKVKDMAQFLLDHGVEENRKVVVCERLSYPDENIVEATLKDIAQSEFTYMCIMIIY

SEQ ID NO: 11646 - protein, 936 aa, Methanobrevibacter gottschalkii
MNAKLNTTCFILLFIFLITAVSAADNKNETLLTQKETDSSQKLCKSSVSKETSKKEKVTLKAPNLKMYYKDGSKFKATVKNKNKKAITKAKVDFTVNGKVYNKKTDSKGDAYLTISSLKSGNYPIKIRFAGTTKYTAISKKSTITVKSTIKSNDFKKYYKNTSPYTSKFYNQKGNILKNKAVKFKLNKKHYTVKTDKKGVGKLPINLKPGTYAISIINPKTSETVNKKITIKSLIKTKDLSINGQNDGKFNVKVFNNKGEVYPNQKVTFKINGKTYSKKTNKNGIATLDINLDVGKHSITTEYMGLKNTNKININKIVKSTNYIHTTLIPNYVNVTAKYVVNNSVYCLKSGINGIIKMPKNEIFKIQVGGKIYTFTTTSINGINSITLRYNNNYLVPFDGSGVKSYTNRNKLTSDGIIISKVNDYTQIDYQSKTKDNTALFGFYASKGLDKSETLTYVENDKITAKINFNTLSFDEFSLRYSLSALHGKTIYNFNYGNYNDTIRFANTNTPVTFSYFGNSIVGYASQETIITKFKVDEIKEVEKEENISYGLNKKYRTAMGFEVLQSYTLINEKINQKTLENWVLKNPDYLSRFGVMNIYGMHLASLEVAWIADIIADKSSKELNVNWKRNNTLTILGGINLEDTYLNILNADMGMKVTGKFDNAFLFKLLNSMNLPNIEEYALLKVAYRYLDKSSNSLDNVFLSILKNNFSIAQLDDMIYIFSEANSKSAIILNTSSGVSSVVLAQNSVYKGSSLKTTHDCCGVGIIPKDIIKGIKETFNIINNGLSNIYPNKTHPISKLFYMAANLLAKPLNGVGSLGMNLITTMALIQSGGTTYRNEMVEKSDWHEVMDKITFTRPGYLQSKKIYNIPNEKGGCDFIEVKIRDDMTLDRNNAIYISDGKTRKLSKTETYKYFIDDYWTPFSMPQKYWDKSWNR

SEQ ID NO: 11647 - protein, 109 aa, Methanobrevibacter gottschalkii
MIKIKKESKFTVSIIIILCALIAITLVYPKYSAIWDVAFLISIFYTSTQTILDTSKKSKRKLNINIVIIIIFATIIAFYEMSIGNPLIFSTALLILANLLDSTLNKKSN

SEQ ID NO: 11648 - protein, 336 aa, Methanobrevibacter gottschalkii
MSFKDYFKFDKDKTTFIFVGGKGGVGKTSVSSATALWLAEQGKKTLIVSTDPAHSLADSLEVPIGSYPREIKTNLFAVEIDPDVAMAQKQAQLEAQKAANPDDGGLLGMDFLSDQLDMASASPGADEAAAFEMFMGVMNSDEFDVVVFDTAPTGHTLRLLSFPEVMDSWVGKMMMLKAKLGGVTNSLKKIMPFMDAVDDPQTSEDLKRTKEQIDMAKEVLSDPDRTTFKMVVIPEEMSIYESERALEALGKYDITVDSVIVNQVMPDICDCDFCHSRHKLQQKRLALIDQKFPNQHIAEVPLFKDEVKGQDKLLKLAHILYDDEDNDEVVQDAIQL

SEQ ID NO: 11649 - protein, 269 aa, Methanobrevibacter gottschalkii
MIKVGENISEIPKLNCEKTKCNIVDFIKSKVSESKSKGIVIGLSGGIDSTLAAYLACEAVGKENVFGVSMPSTTTPTEDKIHAIEIAQELGIKYKEIAIDSVLNEYLSVTQLDNYNLAIGNLKARIRMSIIYYYANHNNYIVCGTGNRSEILIGYFTKHGDGACDIEPIGNLYKTDVFKLSEFLNIPKEIIEKPPRAGLWDNQTDEDEIGMSYDLLDQILYLSTEKYMKNNEIANRLNISAEEVDMIINKIIRSKHKSKVPESPAKTIL

SEQ ID NO: 11650 - protein, 951 aa, Methanobrevibacter gottschalkii
MSENIEKKWQKKWADAKLFESNPDEREKLYLTVAFPYPSGAMHIGHGRTYTVPDVYARFKRMEGYNVLFPMAWHVTGAPVIGIADRIKRKDKWTLDLYHNVHGVPKETLPKLEDPEYIVKYFSTEYHEVMEEMGYSIDWRREFRTIDPTYRKFIEWQITQLHEKGLVAKGEHPVKYCPNCDNPVGDHDLLEGEGVGVNELTLLKFPIGDKILVTATLRPETIVGATNIWLNPDVEYVLVNANGERWVITKEAHYNLKNQIKNLDIISEINPNDLIGQMAKNPFTGEELPVFPASFVSESYGSGVVFSEPADAPADYIALQDLKNNAELISKYNLEGIIENVHPIPVCTLKGYGEIPAADIIERLGITDQNDEKLHEATNELYKAQHSKGKIIDSIPDFGGMKVRFAREELKEKLINDNMATIMYDFAERPVVCRCGNNCVVKIMDDQWFMKYGNEEWTEKTLEVLDGETIIPKEIKNNFEYYLNWLDDWACSRKVGLGTRLPWDNQWLIEPLTDSTIYMSYYTIAKYLKDMNPDDLNLAFFDKVLLNKDSGEITVPAEKVKEIQDEFNYWYPLDWRLSAKDLVGNHLSFLMFHHSAIYPKDKWPRGTVVFGMGLLEGNKMSSSKGNVILLKDAIKDYSADVVRLFLMASAEPWQDFDWREKEVLGTKRRLEWFREFAARVEEIKGSPLDLSNIEEVELKRTIDLWIISQLNQHIKNATEALEVFQTRQALQDSLFLLKKDVDHYLYRVKHIIDAQDSAVIYVLSTVLEAWIRLLAPFTPHTSEELWSTYGGAGFASEAAWPEYNEELVSAEIEKSEDLVENIIKDIAHIKQMVGEDVEKVHIYLAPDWKWDLYKIADEVGKPDIGQIMGRAIGSKIHDDKKEIAMVAKKIGKEITKTRYIGKINEAEILSDALDYIKEECGNEVIIHTDDSYDPQNKAKNAMPYKPAIFME

SEQ ID NO: 11651 - protein, 243 aa, Methanobrevibacter gottschalkii
MKMILDERGKKYVLKSGEDFQSDLGIVSADVLNDADIGEEVKSHLNHTFKIIKPNINDFIDIMDRRCSILLKKDIGLVLAHTGLGSGSRVVDAGTGAGAIALNFGNVVGSEGDVFTYEIREDFAEVARKNIEKFGITNVHVKNKNIKDGIDEDKIDLVFLDLPKPFEVFEEVMECLNVGGWLTVYAPYIDQAEISYRIAKKLGFYDIEIFEILERGLEVRPQGVRPKTRMVGHSGYMVFARKL

SEQ ID NO: 11652 - protein, 318 aa, Methanobrevibacter gottschalkii
MKNTWKLKLRMILTSVVMFTIVYFLIMLVGLYLGVSSWKLYFGASLVIVFLQYWFGPSLVKRSMNVRPLSEAEAPHIHQMVQELADAAGIPKPEIGLSEINIPNAFAYGRSSRSGHIAITRPILGLLDRDELKAVIGHEMGHIKHNDMIVTAAVSVIPMICYYIALSFMFSGDNDNGGGIIIGILGYVFYLIGQLLVLFISRTREYYADEASVDFGNRPAALVSALYKLSYGAASCDKQTISEVNTNRAFFINDVNNARHDVSDFQQIDFDGDGKISNDELRRLANSDVKVSRKNGLMELLSTHPDSLKRVKRLAELE

SEQ ID NO: 11653 - protein, 315 aa, Methanobrevibacter gottschalkii
MSGPWVEKYRPQKLEDIVGQKQIVARLQKYVGEESMPNLMFTGPAGVGKTTTALALVKSILGEYWRQNFLELNASDARGIETVRNNIKNFCRLKPVGAPFRIIFLDEVDNMTKDAQHALRREMEMYTKTASFILSCNYSSKIIDPIQSRCAIFRFAPIKGEEIKERLKYICESEGFQADDEGLESIVYFAEGDMRKAVNVLQAATSEGETVTEDSVYEVVSKAKPQDIENMINKALMGDFMGARTLLRETIVLQGTSGEDMVTQIYQDVSKRVLEGKMDASIYMDLIESIAECDFRIREGANPRIQLEALLTQFL

SEQ ID NO: 11654 - protein, 481 aa, Methanobrevibacter gottschalkii
MLWTDKYRPQELSAVVGNKKEIKIITDWVNAWKSNNPQIPLLLVGPPGIGKTTLSQIIAKQFSEHIELNASDKRSQEIIKSTIGESSSSRSLFGDEYKLIILDEVDGIHGTNDRGGVKAIGDIIKSSKHPMILIANDFYSKRLQSIKPKCQVIKMKKSRWNSITKLLREIAQAENVDANPAALKEIALKSQGDVRSAINTLQALSSKDSTLEVQDVENMKTKDTRSDIFNAITGVLKSKTPAHVKEAMWIEEDPTLVMEYIAENIPREYKKKDEIKKAYDYISKADIFFGRTQRSRNYGYWKYASDFMGIGVSNSKHETYKKFTKIQTPTIFTLMSRNRGKRNLRDEIAEKMSVKLHVSHSIAISMFPYLEIMFKNDELAWEISDYLELEDNEIKRFRSKKIPKKVINKMEKQKAQMRVEERDRRAEELKNQMITAAVEIEDSYEISKPDETKAEDTVKKEPPKEKKEKKKTDKQVSLFSF

SEQ ID NO: 11655 - protein, 229 aa, Methanobrevibacter gottschalkii
MDLMFDVSGLAGEKEEFSTSKKDVLKFLKIIGVDSRFVSYTPDKIYINNLRFSKFSRKRQATFNKQYPEIEVVRSSLFQKICSKSSKHLALEIKPNSLVLMPKDNFIVELIMEPYTRKYGARLVYEGDYDLMVNPLILDDQVNDIFEGIFNGEGLNFNINSNEIYPLINVPLNWINSFLEMDGQKSIENKNKNRLAASFSEFLEDVAPQYKENVVKAAKYIEKKLETEQ

SEQ ID NO: 11656 - protein, 283 aa, Methanobrevibacter gottschalkii
MKIKGSTNIVGLIGHPVEHSFSPPMHNAAFDKLNMDYAYVAFDVDSNNLKSAIDGAKSLNIKGFNVTIPHKIGIMQFLDEIDEVASLIGAVNTIDFKNLKGYNTDGIGAVRAIEEVTNIKNKNVVVAGAGGASRAISFYLARYGADTITLLNRNVDRAMNLAEDILDSGLITEIKSDSISEINSYLSDADILVDTTPRGMHPHTDDEPIARAENMQEDLVVFDAVYNPNETVLIKEAIKAGAKPVYGIKMLLYQGAESFKIWTGRKAPIDVMEKALGETLNLE

SEQ ID NO: 11657 - protein, 431 aa, Methanobrevibacter gottschalkii
MEFTRPRGTRDFLFEEMRERKQAESTLRTVFESYGYQEIQTPLFEELKLFTTKSGEEIVNQLYNFKDKSDRELTLRPEITAPVARLYLNELEKTSTKPIKLYYYGSCFRYERPQKGRFRQFWQFGCELIGAKTPQGEAEVIALCCDAIKSLGITTADVNLNHLGIIRGLFKHFDISVETQREIMVVIDKGDKDLLIESLSGDEPVINNEELNQILLKLIDLVGDKSIIPEVEELISPYEESKAALEEFKELISLLDAFKVENYTLNLGVARGLDYYTGIVFEIYVPELGAQKQICGGGSYSLVKLFGGQEVESTGFALGFDRLMNAIEELADKEELPSHLDVYVAPISNDVRLKAFEITQILRKNGFKADVDLNGKKFKKLMNYADKIKVEKMIIIGANDLKSDKVTIKNMINGEQELVGINNIVDYLKEE

SEQ ID NO: 11658 - protein, 135 aa, Methanobrevibacter gottschalkii
MKVNFRHEINGVKVITAIAQDAKTNQILMLANMNKEALIKTIKTGKAHYWSTSRNKLWLKGESSGHIQEVEEILVDCDMDAIILKINQTGAACHEGYLSCFYRKINTKNEVDIDDLKDEDLEVILERLVNPEDVY

SEQ ID NO: 11659 - protein, 614 aa, Methanobrevibacter gottschalkii
MKCIIPDTSAVIIGAITELIEKENIDYPEIIVPEAVVCELEHQANANRSEGQKGLKELQKLQELQYDGELSISFKGRRPTNHDIKYAKSGEIDSIIRDLARSEMGTLLTNDKVQAETAKAQGIPVYYFEQEYKETPLSIEKFFDDETMSIHLKENVVPMAKKGTPGHVDFKILNEKRYTYKELKKIVDEILDKAKSDPKTYLESEKEGSFVVQSREYRISIAYPPFSEALEITAVRPVVSISLNEYNLSEKLLDRIRTSAEGILISGSPGAGKSTFVQAIAKYYSSKLNKVVKTMESPRDLQLPDEITQYSPLEGSMENTADVLLLVRPDYTIYDELRKNSDFNIFADMRLAGVGMIGVVHATRPIDAIQRIASRVELGVIPSIVDTSIYIEDGKVTHVYETKMTVKVPTGMKEADLARPVIEVRDFETGELKNEIYTYGEQTIVMDMDLVNGSQNSERQKTAVEKIAEKEILRKIRKILPKKAKVDVEVTSPERANIYIPEDFIPKIIGKNGKRIAEIEESIGISLGVEVIESKPINKHPIEVDIIHTKKQLILDLGRDKGRKNFDVFIDGEYLLTATTSKKGEIKIKRGIELSDFIIEAIEMGLEITAIQKM

SEQ ID NO: 11660 - protein, 249 aa, Methanobrevibacter gottschalkii
MKIGASTLAGIEYKLENTLEFIEDLGLNYAELVHQFPNESIDVELLENFNLKYSIHTPFMDVNIASLQNQSRINAINQIKSSFKLANKIDCESVVIHPGTIPFLANKYFRSKVIDVANKSMIELGGYGEDLGVQTTFENMPQFDNMIYSNIEKLHEFLTDNNLSMTLDIGHAKHAGYSSEEMYFDSIKHIHIHDNFGDDDTHLALGEGSIDLNHIVNTLEKNNYDGIYIIEVNNYDSIKKSYEYMKKNF

SEQ ID NO: 11661 - protein, 773 aa, Methanobrevibacter gottschalkii
MTSYISHPLLKENAIESRLYQQVLAGDVLKKGNTMVVAPTALGKTIVAVLVAADRLQKVKNSKILILAPSKPLAIQHEASFKEFITLPCASITGAIKPEERVKRWEESRIISATPQTVESDLLNGRYDLSSVSLMVFDECHHGVGSYSYVYLASRYVQESKFNLILALTASPGSDKLKIKEVCENLYIQNIVVKTEEDADVKPYFNPVELDWVRVKMSSEIEKIKGYVDKSLKIRLKALKNMGIIRTVSVGKVDILKARGKVQGEIARSTNPDKDLFQAISILSAVINIQHAQELIETQGVQTFNKYVARLRKKKTKAAKSLMWDDNFSRAIKLAREAEKHGWEHPKLGEITKIIKKELGESDGQLKLTTNRFDDKNDKNASKIMVFTQYRDTLEMIHQKLEKEGIKSVKFFGQASKDGEKGLTQKQQKAIIKSFKMGEYDVLISTSVAEEGIDIPAVDLVILYEPVPSEVRMIQRRGRTGRKRTGRVKVLMTNGTRDEAYYWTSVNKESRMKNQLIDPDVLEELNASAIERMENQRNVKVIEKPKKENNFPIVYADSREGNSKVIRHLTEMEIDVKVNSMAVADYQVSDEVAIERKTAKDFVDSIIDKRLFKQARELSEEFKRPLLILEGDDLYAGMVNPNAIRGSLASIAIDFGISIIPTRNAQDTAAMIKRIAVREQNGERTPIQIRTDKKPVSMLEQQLFIVESLPNIGPVNAKNLLAHFGSVGKIINASESDLQEVEGIGKKTAENIRKVIDSKYLYFEKEIKEKRLL

SEQ ID NO: 11662 - protein, 503 aa, Methanobrevibacter gottschalkii
MNKNKTFGVIGVCGANGNLIARILKQRGYNVIGTDLSFKKDCRFAKALEGYDIEVFYGNAPEAFFKKADYIIPPASLSKDSSLFKQMGDKPIFELYDVIEMIQSEKPVFGITGTNGKTTTTTLLKKIAYDNGIKPCEHDLEGMQGNAEFIPILQSRLDGDVGIIEVGTFGVPGTIGRIVKNTGMSGGLITNITPDHLNDLGSFMDYAKVKAEFISELGLGQLIVNGQDPTIMGLLRELDFKGEVITFGVDELPDSIGMKECVCGNEIAVKEIISGCGYYFCKCGLTTPQADYIATNIDLKNRTFDLHTPTEKLTVKMGVDGLHNVYNLTGVIIAAHKFLDLPYDKILPTIASFTGVSGRMEEVAKVKGKDIFVDYAHNPAGVETVLKEFKKLFGDFTTVITVSSESGYVGDIDIFNSALKFSKFIVPASVASQKIAIEKLKSKPELNDRIFLNHIDNFEKTGTLGASEDEVRDGLRKALNLDCEMVIAIGEAATKFKNAVFDL

SEQ ID NO: 11663 - protein, 461 aa, Methanobrevibacter gottschalkii
MNYLVVGAGNASRPVARLLNYLGHDVVVTDLKDISEFKIEFQRSLIEMEKEGVRLDMANKNPSVEGFDAVYMPPTLPETAPIAQKIYESDLKILTNEEFSKIVNDLIDVDIIGITGTMGKTTTTFITTSLFKQAGYKVWSCSSLVNNLVSEAIVDGIVKGKVNECDIAIFELPHGTIGLLNKLNIKIGLLTNIAEDHLSEFGGSLEKYQKRKLLLQAMSEIFISNNSCHDIIEKVRDDAIFYALDEDVDFKGTVGDKSLTIAYGDNEFTTPFNMMSYFFENSVAAASIALTYGVNEKDIIDALKAFKGLPAHMEDVGEYNGRKVILDSAFLYDGMKITLDYFKDDSVVLFLDHFDTLSVRDKAEVGNLISEYNLKAVIASGFNEVTQAVEMDAANEILDAITNINIEKVAVETIEKAAELTFKYSEPGDVILHMGPLIAYDRLTTVDKIIKGLERGSKKYE

SEQ ID NO: 11664 - protein, 395 aa, Methanobrevibacter gottschalkii
MFLTKKEEQMCDGEFGETIRKSMDILVALGDIYGASKLVDITSAQVSGVSYKTIGDAGLEYLEDLARDGSGKATINASLNPPGTDLDNWKELGFPEEFAIKQNQIVDAYANLGIYKTCTCTPYLVGNVPRFADHVSWSESSAVAFVNSVIGARTNREGGPAALAAAIVGKTPLYGFHLEQNRKANLIVNVDCKINGADFGALGYIIGKFVGGGVPYFNLMNSPNNNDLKTLGAALASSGSVALYHMENITPEHKNAGKDDVEDIMFVSRDQINETRQKLSTTDKKPDLICLGCPHASLDEIKQVASIVQGKTIKNKLWICTSVSVKATSDRMGYTKIIEQAGGNIVCDTCMVVAPIEDMGFEVIGVNSAKAANYVPSMCGLDVVYNDVENLIQFK

SEQ ID NO: 11665 - protein, 444 aa, Methanobrevibacter gottschalkii
MLNRASEATDMLKEHIENDDVIRIISHNDADGISSAAVLANALAEEDVQFHTTIIPRLKGDIVNQLRHEKYDLFIFSDMGSPFIKEFNTYKHDVIVADHHQVNDTEAESNVVHLNPHLFGIDGSKDLCGAGSSYLTIRGLDKKHLAYFALIGAFGDMQGQNGFTGVNKLIVDDAIESGTLEIHEGLKIVSKSSEPIFKSLAYTFSPPLPKISGDFEGAREFLERMNLSYGIKFTDLEDEEKDLLKEALMSINPDIFGDCYTVPKEVPLLRDLEEYSYILDACGKNKKQGLGLSIALGERDQALDTALKLQSQYRDQIVKGLEWIKKQGAEQLNSIQYLYSEDKVLKSVMGTIASIGLSVELLDDSKPVIGLSRLHKDIKISGRTTRNMVAKGVNLGKALQDSSNNFGGTGGGHDIAAGAMVAYEFKDKFLHLVDEMVEYQLTND

SEQ ID NO: 11666 - protein, 132 aa, Methanobrevibacter gottschalkii
MARPEWVTYSDEEIEEMILKFNKEGKSTSEIGIVLRDQYGIPSVKDVTGERITQILKRNDQAGQYPEDLLNLIKRAVNIRDHLSENPKDLHSKRGLTIIESRIRRLASYYVSEGALPEGWRYNPKEAALLVK

SEQ ID NO: 11667 - protein, 183 aa, Methanobrevibacter gottschalkii
MITFITGNEHKVKEAENIFKDYDINLEHIDLGYEEPQGTLEEVAISGAEYACRKLDKPVIVEDAGLFIKALKGFPGTYSHYVQDTLGNQGILKLLADTDDRYAEFRSVIGYCAPNSEPKIFLGKVSGEIAVEERGDLGFAFDPLFYVPSLGKTFGELTTEEKNQFSHRKNSLEQFIKWYSSQE

SEQ ID NO: 11668 - protein, 529 aa, Methanobrevibacter gottschalkii
MICLGIEGTAEKTGVGIVDGDGNILAMTGNQLFPEEGGIHPRMAAEHHAEWIPKLIPQAIEESGLSYEDIDMISFSQGPGLGPGLRIVATSARSLALSLKKPIIGVNHCIAHVEVGKLDTGAVNPVSLYVSGGNSQVIAHESGRYRIFGETLDIAIGNCLDHFGRETGLGHPGGPVIEKLSKQGSYIDLPYVVKGMDFSFSGLLSAALREAKKGTPIEDICFSLQETAFSMLVEVTERALSHTQKDEVMLCGGVAANSRLREMLNTMSEEHGAKFYMPEMKLCGDNGVMIAWLGLLMFREFGSMDLSQTGIIQKFRTDEVDIPWVDNVKTYLKLSDDLIAKGAESNIVKSNYLGEKAVLKDRIPKGYRIAEIDDKIRRARTKEEAKLLSDAKCAGVKTPILYDINLEEKSILMEEIKGKMVKDVMDEDLAFKIGVEIAKLHAADIIHGDITSSNMMLQDGKLVFIDFGLGKYSNLDEDKAVDLLVLKKSLQSIDYNLASKYFDCVLVGYGDENMVNKISDIESRGRYTH

SEQ ID NO: 11669 - protein, 166 aa, Methanobrevibacter gottschalkii
MGFYNANTPEQKRVKKLTGDINISDLFKNECKTRGIAIYNAYNIQKRLLHEVEQEQLHGVKEVDDRLMELLDERGKNKVTHRYVDFISNEDSASKGIIPQKTNEQNPLPPNQIRIPPRARDGKQFLNDDELPEIEMLKKIMLQNKKIINQNKIILEQLRKLGEKDD

SEQ ID NO: 11670 - protein, 356 aa, Methanobrevibacter gottschalkii
MKKMIDGIKTYGSTELIEKLQECDDPVFLLTIGTTDTSTIPDISGAGATPELTVFTPAADAEFLVLGEVHCTRTAAETVVDGAAAPTPARLTKAALQLSNIPFVIIDAGSKVKADVSYYSFGKEHGRDIRTGEGILNPLEIIENGKDLGNELSRRHEMLIIGESIPAGTTTALGVLKALGYEANEKVSGSMPHNPHDLKSKVVDEGLRNAGIIPGEADAIQVIGAVGDPTIPAIAGLVLGSDIPIILAGGTQMAATCAVIKSIQPNFDFSRINLATTVFVAADETADLFGILNQIDSSITVHVVDPKFEDSKHEGLKNYLTGFVKEGAGAGGMMFTALVLGSSVEELREKIEKVCK

SEQ ID NO: 11671 - protein, 277 aa, Methanobrevibacter gottschalkii
MDILQAIIIGIVQGLTEFLPVSSSAHLVFAQKLVGVESSLTFDVLLHLGTLIAVLWFFRWDIIKMLKSWWLSIGDLLQGRFKQGFYDDPYKRLAWYVILATIPVGIVGVLFDDAIESLFAGALYVPAFFLFVTGTILYLSQRMNSGKINMNNMSKVEALVMGLGQACAILPGLSRSGTTIAAGLVMGLDKEFAAKFSFILSIPAIFGAFIFKLKDIGSAMDVNFLPVFIGFIVSILAGYLAIKWMLDLIKNRSLDIFAYYCWLMGIIVFMGSISHIF

SEQ ID NO: 11672 - protein, 307 aa, Methanobrevibacter gottschalkii
MAWDDTASKIWVDGDMVDWKDAKIHVLSHVVHYGTSVFEGIRAYKNENGVAVFRLKEHVQRLFDSAKIYKMEIPFTQEEIQEAILEVVRVNDLNGCYIRPIAFKGYGQLGVDPSSCPVNVVIAAWEWGSYLGEEGMANGVDIGVSSWRKPAPDTFPALAKCGANYMNSQLAKLEAIDNGYDEAIMLDYEGHVSEGSGENIFLVEDEKLFTPAMSSSNLKGITRDSIMTVARDLGYEVIEEVISRERLYSANEVFFTGTAAEVTPIRSIDHRTIGIGKRGPISEKLQTAFFEIVEAKVEDKYGWLSYI

SEQ ID NO: 11673 - protein, 275 aa, Methanobrevibacter gottschalkii
MVVKIAIIKSGNIGTSPVIDLLLDERADRPNIDVRTFGSGAKMNPEQVEDVVPKIDAFEPDFAIFISPNPGAPGPAKAREMLSEKDIPAIIVGDAPGKGKKDEMDEQGLGYIIVMSDPMIGAKREWLDPTEMAIFNSDILKVLAETGALRLVQQTIDTVIEQAEAGEIELPKLIVTAEKAAEAGGFANPYAKAKAIAAYEMAGSVANLDMKGCFMTKGFENFIPLVAAAHEIAACAAKLAQEAREIEKANDTVLRTPHMKEGNLGSKTDLISKPE

SEQ ID NO: 11674 - protein, 192 aa, Methanobrevibacter gottschalkii
MTRNINVSRKTSETDINIKMNLDGTGKYNISTGVNFFNHMLESFSKHSMIDLDVQARGDIEIDDHHTIEDVGILLGEAFNKAIGDKKGIKRMAHSIVPMDESVATIAIDISGRSYCNMDLKFKNEKIGDMTSDVVIHFFESFAGSAKLNIYGTVEGANDHHKAEAVFKAFAKSIKEAIKIEHNQIPSTKGVL

SEQ ID NO: 11675 - protein, 63 aa, Methanobrevibacter gottschalkii
MLQILVDEEKCIGCGNCAEICPKSAKIWKVKDVAHILDLRYCHVCTLCAMECPTQCIKIERNG

SEQ ID NO: 11676 - protein, 230 aa, Methanobrevibacter gottschalkii
MADVNAGVEYKINVDGNLFLLDNKKYQLLQSILDTGSLTNASKEIKVSYRTALSYIEKMESALNVKIVNTTKGGKGGGGGTSLTDEGYSILKECKKINAIMELHKDVNEIEADIVDINVEKGVMTIKMNQFEINAPLNRNYDIGDKILALISYDNIFLMLEPQSSSIRNVLKGQIIEMSLQNEIIRVKVDVGGVVLCSDITVSAEKELNLNIGTEVYVGFKAMSVATLKL

SEQ ID NO: 11677 - protein, 518 aa, Methanobrevibacter gottschalkii
MANKLIRGSLIILIGNVIFRIGGYIYRFLMAILLGPTAYGILGITLPFQGIFQTLSAGGLPPAIAKYVAEYEAIDEKDMARQTIYTALKIMVFLGLFFGVLMIFIVAPYLAYGYLGKPEALIPLQIVGLITPFSVIVGAFRGAFQGVYKMEYIVYTRAVEQLGMILFATAFVLIGLSTVGALWGTVLGYSLSVVAAVYIFKYHMGNLIPEPSDDFVFTRRDELKLATVLVKFSIPVIITAIAEMLIYNICTIVMGKFLTFDDIGFFAAADPIARLPLIISISIATTILPASSEAFKLKDIGMLQKYVSEAYKFSLLFVVPMCVGLALFAEPTLRVLYFKNPAYVAGAMALAILSIGMTFYSIFAISTSIVQGIGNPRIPMYILVGGAVVTGVLNWIMVPTLGIAGGALATSVACFLMMVPCIYFVFRLTKTKAPVVAVAKILVASAVMGIVAYFIPKSTLFLFPGIVLCMVVYFFALILVKFFQKDDIESLRKFSSKFGPFSKLINKMLNFVERIEFR

SEQ ID NO: 11678 - protein, 194 aa, Methanobrevibacter gottschalkii
MKIFGICASPRNNTTEYALSKAMRRLNEEGFETEMFTCQSKDIKPCMHCDYCLEHKKCIIQDDMGDVYKGLLTADGIILATPVQNGGISSYLSAIMDRTRALEAIDYNILRGKIGMSITVGGDRTGGQDFAHLKNITYFMIHGIIPVSGGPFGSNLGASFWSKDSLDDIKEDYYGMDSLNRTLHEFENFLNKYI

SEQ ID NO: 11679 - protein, 112 aa, Methanobrevibacter gottschalkii
MIRRKKGKFLSQGEEDPMSGTSNLVDVMLVIAVGLLIFLVISWNMQNIVFNENMDEQQKEKVKNAIKEVSQIDQGNELNDTPDISKSSGKGFTEMGKVYRDSDTGKLIMVEG

SEQ ID NO: 11680 - protein, 213 aa, Methanobrevibacter gottschalkii
MVAIPGSEFLTAALNVVSQSLQIPVIIFLLIFAVFAVFAFGGLISDYRTRIKLNRDYKEKLIFSLVNSKTVDELKHAVDGSEIYNSQKEVLLKIADAHSLSCESRESWALNLIEEEEVVMAKSLEKIDIVTRIGPTLGLMGTLIPMGPGLAALGNGDVSTLAAAIIVAFDTTVVGIGSGAVAYVISKIRRRWYEEYSSNLQLFVNAVLENLND

SEQ ID NO: 11681 - protein, 227 aa, Methanobrevibacter gottschalkii
MSFSLLWSVGFAVSIVVFAISIGLVINSKINSNKNLVKLVFVLFISTLILIYSICIFKIQLNSIIGSYNYVLLFLIAFLLMFIGYIIIKENGCGRTFINVLLLSYLSFILVMLICIGSKESIFGLDDLQISLLATLLFNSLILVVFFACRKLKLIDRSYRSFGSLYLILGIYCLMISLLLPNIISLNMGDMKPINIVSIDSIAFIFILLIVIMVLGLLYYKRNTLLK

SEQ ID NO: 11682 - protein, 171 aa, Methanobrevibacter gottschalkii
MECKKLALLISVIFIMSFAASGVFAHPGHGSEYVEEVTSDDVGSSSNSGSSSGSSGSSSNSGGSTVPASSSSSSSSSSRSSSYSSSDPYSSSSSSSGAHDSNHDSYQGSSSNSVVKDNSSLKDANKTNENLTNDSGEIDNDELFTVNNILLLIIVLFCGFFISVILFKLFS

SEQ ID NO: 11683 - protein, 976 aa, Methanobrevibacter gottschalkii
MGGKNINKHLISLLFFCILVLLMAGGVYAEDIGNSDVFENPISTDIQQDDLSEDDLDISNLNVKVNYQYADDNGKINPTIKVNDKHIISKEFNSSYQNYNVIINSTNIADKLNISISAPGYLTQYKIVTPNMGKSILANVTFNMESSESYKLGRDVTAEADKLLDFKNADDVLAITTAGVAKYNGKTSEDAMEAMVNYGKISYSNILMLRQSAIDPIDFAFIVKKGNELKAIIFQNASTKYSYLGTISENMTKAQWNKYYKSLVGENSWAFASLANGWAAGVSREILQEAAFHGHICEGTLGGYSIIQALLKYYPPEQENNPGGIGSPADITAYKVLGVPGGSDDDAALFFLDDTIGKTGYAGMNTTNTGATENMIGFIKWNSKQKTGDLIIMSFNSTKLKKLFKKETKINADAGSLEELKYCSWWINKINNNPEKLVDFLYEFTGLNQEQYNYLMGTTENITYDGEPAEYGLDGHGLDLNYILSLNLPTAKRTINSVAHAKLTDAELKQIGIDAANKAKKIFNEELGVEIDRDDIDFLALTDAGYAFLNGQDTVVVRDGLHEVLGGTLYSQNLLSLHQAVWKPLWFAFAIRYPDSDLVDMIYLRYNPDTKDFFVGTLDGNRVVDIGFETLNNSDKLKAIAKSFVPDGNWFNIQSIVNAWNEHPLFDQMATFLYHAHVCPGVQPGFFITDYIQEKYPLGENESYTYIASSIYCKDDSLTYLLDLSPGLGTFYVQKLPKNETENGISQGVLVVWDKNLKIGKAVIVNFDDWGTIDTSMYVTSEAKRASQIKAYIDIYGNRNNPNVKSKPIVSTVNEKWITEEQFNMLKQGAGDDFNVLSYLKSLDDITKEDLLKSINQNSNSNSNSNSKPNINPNSNSNSNSNSSSNAIASHTNSNPSSSGSVGTSGAVVSSAYVGEFTKDAESEDSQNGPDDAKSYEVSKSPAAKSADSNSLIYALIGVLAIGILLGVGYMKRDKK

SEQ ID NO: 11684 - protein, 207 aa, Methanobrevibacter gottschalkii
MHLPDGIISFEQAIIYWTITLIIVSLFFYKFSNDENKEKRIISIALFSVFTIGITSLSIPSPLGVPIHFFIIPLIAMLLGPFSSTIVSFVTLIMQALTLNMGGITSLGANFIVIGFILSVATYGFYKLFLNLNKKFAIFGSTVIGIIIATFGQIGILLISGAMNLDVLLSTLLPFYVFISFIEGFANVIIITAIEKIKPEIIEINKI

SEQ ID NO: 11685 - protein, 160 aa, Methanobrevibacter gottschalkii
MKYLKISILLLILLLGISTVSSHGVDVTADTMVVANDSNGKMVKSIAESNNINISVYKFTSEDEVTHILEHSINNTNKRILFTAYQETANDFLKKHPDMSNRIIVIDNVNDNTTLEGLQNIMNVPVENVNSENNFGLPLTIGIIIGLLIGIGCGAYIMKR

SEQ ID NO: 11686 - protein, 279 aa, Methanobrevibacter gottschalkii
MKIGKGIVKKYSRKYNRTLKNGEQKKYTTEQIQITIPKNEDIYYNQEEVLIIPNSEIENFKSREEENEFLKIANYFYVEEVKQLNEQMDENLNSTSEYEKEIEELKAKITSLKDIEDKYNSIKKDNIDQLKQENENIRDKHSKLIIENENLKNKFVNIKTENENLKSKYSSIKEENRNLKIKCSNLKDEHSTIKDSYNQVSTKYDQLKQENLNTKTGYAEIYEINEELEKDYDTLRLEYNDLVDKINSLEEELYKIKAMKDHDTYIANKVKEFILKSGN

SEQ ID NO: 11687 - protein, 93 aa, Methanobrevibacter gottschalkii
MGFCNSCGRPIVKEDYGTNKDGSLNPDFCKDCYQNGEYTEPDITLAEMITRKTKEMMEKNPRLPETQATGITAVFIPGLKRWNPEFQDDYKTL

SEQ ID NO: 11688 - protein, 416 aa, Methanobrevibacter gottschalkii
MDPMYKIGEALIGDGPELAHIDLLIGDKFGPIGQAFANGLSNLSVGHTPLTSVIRPNLMTKPATLIIPKVTVGDLDDAGKIFGPAQTAVARAVADAVEDGYIPKEIVEDIVINVSVFIDPSAKDYRKIYQYNYGATKLAIRRAMEDYPSIEKVLAEKDRGTHPIMGFKVKKLWSPPYLQVALDLDNEDAMERIINDLPDNDRILLEAGTPLVKKFGVGIIGKIRALRPDAFIIADLKTLDVGRVEVKMAADETADAVAISGLGTVESIAKAIHETQKQGIYSILDMMNVAGFEEKLAKLPKDLKPDIVLLHRNVDMETYRAEHGEDTSDMTEWGNIKDIKSMLGDKGLVAVAGGIRPNNAEEAIEKGANIIIAGRYIIGSKDVRRAAQDFLEHFEPDPDNMRLAMDEDENIEVKDD

SEQ ID NO: 11689 - protein, 608 aa, Methanobrevibacter gottschalkii
MRILLIHSDYLNYNVKNKTPVAEDIEEAKKEGSFDDSLVVFTAVEKDDENNPEGIVKNLVSEVKKTNDQVKAENIVLYPYAHLSSSLSSPKVAIQILKDVEEALLAEDFNVKRVPFGWYKAFEISCKGHPLSELSRTITADDAEKAKVERKPSKWQILEGNKITQIEDFEFDNKTFKQLVDYELGQGASDEGEPPHVKLMREKEICDYEPASDVGNLRWYPKGRLIRDLLADYVYNLTVDHGAMPIETPIFYDLDNEAIYQHAYKFGERQYRTDTKKNLMLRFACCFGAFRVMSDSYLTWKNLPAKVYELSTYSFRFEKKGEVVGLKRLRAFTMPDFHSFCADVPASLEEFSNQTEMCMQTGNDLNLDFEVIFRATQDFFDEHEEWMYEVAEKFGKPVLLEILPERHHYWVCKIDLANIDALGRPIENPTVQIDVESGKRFDISYLGEDGEQHNPTILHCSPTGSIERVLCAMLEKTAIELNEKSPMLPTWLSPIQARILTVGESHKEFAEELYSKINASNIRVDIDDRDESVGKKIRNASKEWIPYIFVVGDKEVESGKFQVTVRETGEKVDMTVDELINEINEKCEGKPFRRLPLPKDISRRINFQ

SEQ ID NO: 11690 - protein, 451 aa, Methanobrevibacter gottschalkii
MRIILAGTGSAVGKTTIATGIMKALSEKYNVQPFKVGPDYIDPSYHTLATENISRNLDSFFMKEGQVRDSYLKGMEGKDIAIIEGVRGLFEGIDSVNDIGSTASIAKSLKAPVILIINSRSLVKSAAAIVLGFKSLDPEINIAGVILNKVKNKAHYLKTKKSIEEITNTEVIGGIIRDDNISIEQRHLGLVPARERESSLKFIELWSEVIKNSIDLDRLIEIAKTAPRITSNITPIWNKLNKQQVKIGVAYDEVFNFYYKENIESLEANNAKIKYFSPLKDEELPDVDGIYIGGGYPELFSKELNANQNMLSQIKNFHMEDRPIFAECGGLMYLMNSIHEDAVVNIYPYKSILTDRVQALKYTIAEVKEDNIISKKGEKFNGHEFHYSKVLVNDNNIKNKLAFEILRGKGSYNNQDGFMERNTLASYVHTHVAAMPNFGGNFCISSLEIGG

SEQ ID NO: 11691 - protein, 353 aa, Methanobrevibacter gottschalkii
MNIRKIDFFNPLIVVVAIVVFLLMGYAGSFDYRFEDPLNMNVFLTIIFACIVFATGFLVMENKIIVDKTKEINFISERLLIILVLIALILQTLNIILIGGIPLFNSVLKSNSTTNIWRIAYPLFLIMINLLLAKYYNKKYLILVALGALIFGLNGYRTSVLGILGSSFITLYYLNRISKKIGILFIAIIAIGFMAIGYIASQSIANQHWTLNPGQLVLYRAAFTLEVFEKIIPLAGSTNGHILSMIFSSGSPRTFIGEYVLHYNVCLTSTLFGPVTLDFGLIGLAIQMLFMGVFIGIIYKLKEGIGVGVYSIILTHTLIWIETGPTDIMIWFLYFLGLILIIINHNYIKLNKN

SEQ ID NO: 11692 - protein, 300 aa, Methanobrevibacter gottschalkii
MEKPQLINFIAKVMEDSGFKVYKNFKTSQRVIDIYAILPTTIGDFGVVVACKNYDKDFKIGVDVLREMEEVQQSIKASKVTIVSSSYFSDQAKNYALRKNIKLVDRDNLLELAKKYQDRTSQTTLDNTPYDGGASQYIEDEYPEYTYDASDMEYLMRRREQNPAVYKNTLYRQIDEDRHTGFSSILNRGSSRNSSLSGVTNLYNYQSRKSTFGQDSLLFNLVKNPIVLIILVVAVSYIISYIAGNLLKVDAGISGLIEMIVALFLSYGLSLYTDRNRDFIVKGTFIFFISLIILIILIFV

SEQ ID NO: 11693 - protein, 258 aa, Methanobrevibacter gottschalkii
MNALISNDDGITASGILASKKAMENLCDTYVVAPETQQSGIGHALTLFEPLRVNEYTLRDGSMGYGVNGTPTDAVTIGLFEILDKKPDIMISGINTGFNIGKAELTTSGTLGAAMEAASFGIPTIAISQEVTQDDVKFENGKVEVDFDFAVKMLNKLAKIVLKKGLPEGIDLLNVNIPVNPSDDEFEVVELGNRMYSPVVEQRLDPRGKPYYWIDGEPYEFNEPGSDGYELKIKQKTTITPLKIDLTGDMSLIKEWLK

SEQ ID NO: 11694 - protein, 47 aa, Methanobrevibacter gottschalkii
MAINQLESNLEAITRTIAQLKRDGCTDEKILNELREERDKILKDLNL

SEQ ID NO: 11695 - protein, 67 aa, Methanobrevibacter gottschalkii
MNQDKDNVNKMFKQFKNKYVTVDLRGNYQSEGKIIAIDNYLNIILENENGLETVKGGNIIFISVKEE

SEQ ID NO: 11696 - protein, 335 aa, Methanobrevibacter gottschalkii
MVFIGMDHGTTGISFCIMSDDGEVLDVFKLGREESKKGLVSATEEITKRVDLDSVKLMAITYAMGDGINQILPTDKVEDRGILSIDGAGKVTGGGTSVFSELESLDIDSIMIPGLHKDSNSLNELFRAAYSHQASPEKVSICYNGLKETGWSNFIVADISSNSVDILIENGKIKGAMDACLGAMGVVHGPIDLKMIRDIDEGKSSANDCFSHAGAIKIAGISGKVANVKDVLLEKYRNGDEKAKLAIDTLIMTVAMEIAGLDVICENEIEGIVLTGSIGSAIEPFNFEDEINKYFKNKYHLKVISKESGAIGAAQIAMDVYNGKEEILGIEVNIS

SEQ ID NO: 11697 - protein, 330 aa, Methanobrevibacter gottschalkii
MKMYYDADVNTDALKGKTIAVIGYGSQGRAQSRNMADSGANVIVGVRKNGSSWNLVQEDGMTVKTIEDAAKEADIIHILLPDEIQEKVYKEQIAPYVESGNTISFSHGYNIHFGLIDPAADVNIVMFAPKGPGSMVRRTYEEGFGIPGLVAVERDATGDALQLALGMAKACGLTKAGVLETTFKEETETDLFGEQTVLCGGITELINAGFTTLVEAGYQPEIAYFETCHEVKLIVDLIYEKGFAGMWNDVSNTAEYGGLTRGKTIITDEAKEGMKVALKQIQDGTFKKQFADENATDGANLKEMRAAEGQKEIEIVGERLRKACGLQKDD

SEQ ID NO: 11698 - protein, 175 aa, Methanobrevibacter gottschalkii
MSILENVLEDNKKFVENFEGEEMSHHAQKNLAILTCMDCRLINFFEPALGLKRGDAKIVRNAGNSIVGEDAIRSIGAALYNLGAEEVLVVGHTECGMAGADVEALKEKMLARGIKEEDIAKYDLSKWIGGFDDEEENIKNVVEKIKNHPLIPDVPVHGLILDVVTGELKVLVDGY

SEQ ID NO: 11699 - protein, 161 aa, Methanobrevibacter gottschalkii
MNKEYHVISTLVEDRPGVLQKIAGLFNRRGFNIDSITVGASEVEGLSRMVISVNADKQGLEQVTKQLNKLVDVIKIKDITQNAVNRELCLIKVHIPNEKARAEIMQYTNIFRAKIVDVSEENLIIELTGDIGKINAFISLIKGYGIKTISRTGLTAMARGV

SEQ ID NO: 11700 - protein, 565 aa, Methanobrevibacter gottschalkii
MRGGEAIIQSLKNMGVKTIFGYPGGQTIPFYDMLYDSDMEHILVRHEQCAAHAADGYARASGRVGVCLATSGPGATNLVTGIATAYMDSSPIVAITGQVPTHLIGNDAFQEADIIGITMPITKHSFQPKNPNYIPSMIKSGFEIAASGRPGPVVIDVPKEVQEGELSDFDDSLIDTPGYNPTTKGNLRQIRKACNLIKDAKKPMILAGAGVIISGACCELKKLAHTINAPVMTSLLGKGAIDETDDLALGMLGMHGRKVSNDYINESDLLIAIGVRFSDRTTGRLDSFAPDTKVIHIDIDPAEIGKNVDVDLPIVGDAHNVLTSLNNYLKEYKVSRDVTEWANMIKEKKQKLRPRVSYSDVPLKPQTVIKEIAEALTSDSILTTDVGQNQMWAAHFFETQKPRKFISSGGLGTMGFGFPAAIGAKVACPEYPVVSLNGDGGFLMVCQELATIREYDLPVIAIVLENRTLGMVYQWQSLLYNGRHSQTLLGNSPDFVKLAESFGVNGVRITEPGETKKEVASAIKDNEPVLLNIVIDSEEALPMLPPGAGISEMIGEYKLEKDVIR

SEQ ID NO: 11701 - protein, 110 aa, Methanobrevibacter gottschalkii
MELTKYICHRKPERSFHIKNHQFPVCARCCGFYTGLIVYLICYQFYNHNYDLNMLLISMILMIPVAIDGFTQYFSLRESKNNLRFITGLIGGIGLIIFLKIIIRWILYVL

SEQ ID NO: 11702 - protein, 302 aa, Methanobrevibacter gottschalkii
MGSLLSVTDIKDDVKYILELASKIKAGEIEEKPLKDKTLAMIFQKSSTRTRVSFDVGMYQLGGRAIFLSSNDLQMGRGEPISDTAKVLSRFVDGIMIRAIEHDDVIELAKHSDVPVISGLTNLEHPCQALADMLTIKEHFGVWKGKKICFVGDGNNVCNSLLLIAPLLGMNMSVACPKGYEPSETILKTAKEYAMENNTEIIVSDDIGVALENVDVVYTDVWVSMGDEAETKQREIDFAPFQVNSDLMSIANDEAIFMHCLPAIRGQEVTGDVIDGPKSVIFDEAENRMHAQKAVLYYYMKD

SEQ ID NO: 11703 - protein, 277 aa, Methanobrevibacter gottschalkii
MNNMPKDLDKIKFELSEKLEFLKENAESEEEIEKLNNFASYLADKYSQIDDEDIKTEKLNRINTGLSYYQRFKKALEKNIDIDPGRLMGLTDGIFGMVMTLLVFGIALPELQITYYSTFLSFFSSLAPTIGVTVVSFVLLSSFWIYHHEFIKVNNLNIPYLWLNVFFLICISFVPFTTSLIGHYSHFFLSEVIFGINILLTIISFLLMYHYANSMHFLENAPSKKERNYVYQTFGMIMGLTIVVNLLDFHVSSYFIYLFLLVPVISTIRDIRFKMNE

SEQ ID NO: 11704 - protein, 436 aa, Methanobrevibacter gottschalkii
MKVLVVGTGAREHAIADALKEDVELYCYMSKVNPGMSKIAEFKQGDEGEVEKVAEYAVEKDIDIAFIGPEAPLGKGIVDELQKNGISCVGPTQSAARIETDKSFMRKLFEDYNIDGSLVYKVFDNSADVSAFLDEFERDVVVKPVGLTGGKGVKIVGDHLKDNEEAKEYSCEVIDNVMGGFAQVIIEERLIGEEFTIQAFCDGEHLAPMPAAQDHPHAFEGDVGAITGGMGSYSDVGGLLPFLTQNDYDDAVKIMESTLKAIAKEAEPYKGILYGQFMLTADGPKLIEYNARFGDPEAMNVLPLLKTPLIDVCQAIVDGNLDKVEFKDKASVCKYVVPDGYPETEFAGDLVDVDEESIEKLGAKVFYAAVSAEDDGIHLSGSRALGIVASGNSIEEAEKIAEKACEFVKGNVYHRRDVGTTELVNKRVEHMKEILS

SEQ ID NO: 11705 - protein, 454 aa, Methanobrevibacter gottschalkii
MEKNSNIEMITGDPKKAINKLSIPIIASMFLIFANNIIDSVWVAGLGADPLAALGYVTPLFMVLIGIGNGIGAGGNSLISRYIGAEKRQSANNAAIHNLILGIILSIAVSIILLTFLKPLLIVMGASAVLKYAMDYGIVIFAFSFAMLLPPIFGGAFRAEGDVKRATIPLAISAITNMIIDPIFIYTFNLGVAGAAWATVIAHIFAVAAMLYWMLVKKDTYLKYNRESFKNDLTMYKDILVVGIPASLEQLILSALTIVVNFMLTIVSGPVAVAVYTAGWRIINIGMLPAIGVGTAAISVSGVAYGARKYENLRITARYAVKVALIASIIVCIILNIFANQIAFIFSYSESSAQLEPLIASFLQIMCLFILYVPFGASAGNVFQGVGKGSISFILTSFREFVLVLIFAYVLGFTLNMGEFGIYCGMLLGGGIGSLICYICIELYINRLMRSIES

SEQ ID NO: 11706 - protein, 138 aa, Methanobrevibacter gottschalkii
MKFNENKPSAAFISIIHKEHAKYINENVKDEDLSFGLHPILIIIYENEGINQEKLAEVLHLNESTITRNLKKLEDKGFIERIKNKRKKIIKLTSKGRKTAQKVINYDYKWDEKLKQNLTEEEYANFLEALRTICEELL

SEQ ID NO: 11707 - protein, 177 aa, Methanobrevibacter gottschalkii
MNQTINDLKSRRSIRKFKDKQISDEDLKTILETGTYAPTARGMQSPKIVVIQNPETIKELSKWNRSYFPVDVPEDMDPFYGAKTILIVLADSKMPTFVEDGASVLAVLVNAAHAIGVGSCWIHRARDEFSSEKGKALLKKWGIPESYEGIGHVALGYPDMESPKPLPRKEDYIHYVD

SEQ ID NO: 11708 - protein, 566 aa, Methanobrevibacter gottschalkii
MYFEIEKQAIDAINKALDQYDVEVDRNFKLEFPPNPNLGDLASTIAFALTKKLKTSPPEVAKGLVEKIEVPEIFSKVQNFGPYVNFFIDYSKFSKLLLEKVDENYGQLPAYGEKIVLEHTSANPNGPLHIGHIRNSIFGDSLSRLLKLAGRDVITQYYVNDMGRQIAIIVCGITECGLKIEDYDGDKIDHKIGKLYFDANKAVEEDEALNDKVDELIRKYEEGSDKKLNKIFEDVVAKCISGMKESLLRMNIVHDDFVWEGQFVRSGEVNNLVNYIQKEGFTREEDVLFIDLTDFNIDKEFVLRRSNGTSLYSTRDLAYHKYKATLGDTVLDILGSDHKLAAKQIKVIFEEILRQKAPEVIFYEFITLPEGSMSTRKGKFVSVDELINEAVSRAHDEIKSRNPELNEEEIAPMAEDIGVGAIRFFIAKLSPEKHLTFKWDEALSFERGCASIQYAHARACKLLAKSGKDINSLTVSDDWIPNEDEQELVRQIAKFPQVVEDCANKQRVHNITQYCQDLAGSFNKFYKSQQVIGSDLENTRLILVDRAKTTIKNALDILGVVAPEKM

SEQ ID NO: 11709 - protein, 141 aa, Methanobrevibacter gottschalkii
MEIDYKEIASYVVILIIVLIAAQHLNVVVSGSMEPAFYRGDIVLVEKADFFGIHEFNASDVKVGDVVVYDAAWYNQPVIHRIINITDINGTTMYVIKGDNNNAPDPYYVTSSQIKEKVVTVDDNLVVIPKIGYLSLWLRGL

SEQ ID NO: 11710 - protein, 424 aa, Methanobrevibacter gottschalkii
MNSEELFNESKNYFPGGVNSPVRAFKPYPFFVKNAGGSKLTDEDGKSYIDYCLAYGPLILGHANPKVVREVSNQLTIGTAYGTPTENEITLAKEVIDRIPSAEMVRFCNSGTEATMSAIRLARGFTGRDKIVKFEGAYHGAHDYVLVKGGSGAATLPDSAGIPVDTTKNTLSVPFNDEEILTDLIEREGDNIACIIMEVVMGNVGCIEPKPGFLEFVRKITEENNIVLIFDEVITGFRASRGGAQEYYGVTPDLTTLGKIVGGGLPMGAFCGKKEIMELIAPNGPVYQAGTFSGNPISVQAGISTLTQLNNAFYKELERKGNFLRGNIQSIIDDEEYNVQPVGFSSMFQIYFNPAPVYNYADAQESDRKKFLRYFKSLLKQGVFIPPSQFECNFISNAHSMEDLQKTSDAIEISLHEAFKKRRR

SEQ ID NO: 11711 - protein, 209 aa, Methanobrevibacter gottschalkii
MSDKMFMGASTKQGLDIANKSREIIRNLIGDDVKDLNPAERDIVERIVHSTADPEYAKLVKISPDFVDAAMASLKNKETILTDINMVKYGITRYEGEVECYIKNKEVIKIAKENQITRAAAAMRYAADNGFEGIVVSGNAPTAVFEAMDLYEKGEMNLKAIVGVPVGFVGAADSKEALHNSNIPNIIVEGPKGGTPIAVACVNSLIQHL

SEQ ID NO: 11712 - protein, 401 aa, Methanobrevibacter gottschalkii
MEEYEIAVIGGGPAGIMAAIAASQNSSSVILLEKNPKLGRKLLTTGGGRCNITNAKPIRELLKFYPQKNFLKHAFYTLSNEKLLSFFENKGLKFIEEANNRIFPETEKSIDILKILTDYLEDIIISYNFEVKSIDEDFVINDKLKADKIIIATGGITYPKTGCSIKNYSLTKQPITDIKYGLSPLITKKDLSDIAGITLYDVIVSYKKTKVKGNVLISHFGLTGPAIIDLSNFISESISYNLLENDNCDINFEIAIDLCPDFSREKLQEKFNQDFQVKGKTMIKNYLKLFLTNNFIDFFLDEINLDRETQLSRINKKSKNRLIKNLKSFNFKIKGFNNDLAKITVGGIDLNNVNPKTMQSTIIPNLYFAGEVLDLHGPTGGYNLKIAFSTGYLAGLSASEK

SEQ ID NO: 11713 - protein, 439 aa, Methanobrevibacter gottschalkii
MQGLLNDWRRTHYAKETTPDIAGSDVTIMGWVHEIRDLGGIIFVVIRDVTGRVQLTAPSKKVEAEILEDIRKFRKESVVAVRGLVQEAPKAPNGVEIIPNEIKVLNLSNQPLPMDPTEKVQAGIDTRLDSRFIDLRKENVSAIFKIKGQMFHTIRDYFYNNGFHEINTPKLVASATEGGTELFPITYFEKEAFLGQSPQLYKQMMMGAGMDKVFEIGQIFRAEEHDTLRHLNEAISIDAEASFMDDVDVMKVLNDMLINVLTDVNDKCSDELSILGYELDVPKGNFPVVTYDEAVDIVNSRGVEMEWGEDLSREAEKALGDSMGGFYFLTEWPSAIKPFYVMPQEGDEKYSHAFDLMYNNLELSSGATRVHQHDLLVKQIEERGLNPDGFGSYLKAFEYGMPPHAGWGLGADRLTMVLTGSENIRECVLFPRDRHRLTP

SEQ ID NO: 11714 - protein, 427 aa, Methanobrevibacter gottschalkii
MEILKYSDIDLVETIKRSEEDVNKVLGIVSDILDNVKNNHDLAIREYTEKFDGVTIENLKVSEDEIKEAYDTLDDSLLVALKQAASNIEKFHKKQIPHEWEIEVNPGIVAGQIVRPINSAGCYIPGGRAAYPSSILMTVIPAKIAGVKKVVCVTPPQKDGKILDAILVAADIAGANEIYKVGGAQAIAGLAYGTESIPQVEKIVGPGNIFVTAAKKLVYGQVDIEFPAGPSEVLILADETANPEFLATDILAQAEHDPNASCFLVTDSEKLAIEVDEFVKKLTEVAPRREIIEKSLSKSGKIIITNTFEEAIYITNEYAPEHLIISTKDDDDTLSHINNAGSIFLGSYSPVAAGDYGSGTNHVLPTGGGAKMYSGLSTEAFIKKPTVQRITKEGLKELSKTSVPIAEYEGFFEHANSFKTRLKDDWK

SEQ ID NO: 11715 - protein, 549 aa, Methanobrevibacter gottschalkii
MKSDSVKKGIQRAPHRSLLRACGLDDDDFKKPFIGIANSFTDIVPGHIHLRELVEFVKEGIIAAGGIPFEFDTMAICDGISMNHEGMKYSLPSREIIAATVESMTKGHAFDGLVLIPSCDKVVPGMIMGATRVNVPSIVVTGGPMISGEYKGKSADLITVFEAVGAHSAGKMSEEEVYELEKCACPGAGSCSGLFTANTMACITETLGLSLPTCATTHARTEENNQIALDSGKQIVKLVEENIKPSDILTQESFNNAIAVDMALGGSSNTALHIPAIASEVKDLNVNLELFDEISRNVPHIALISPAGEDSMMDLHLAGGIQAVLKTLGDKIDINQLTVTGKTIKENLETVENKNTDVIHTLDNPVHEDGGIAILKGNLAPNGSVVKKGAVADHLMHLKGPAKVYDCEEDVTKAIFNHEIKEGDIVVIRYEGPKGGPGMREMLNPTSALAGMNIKDVGLITDGRFSGGTRGPCIGHVSPEAMENGPIAAIENGDIIEIDINNRSINVELSDDEIEKRLKSVKHPERELDGWLRLYQKLVHSADTGAILR

SEQ ID NO: 11716 - protein, 370 aa, Methanobrevibacter gottschalkii
MSTLEKMKILTDSAQYDLCDYVSHHKSSQINLPGIYEAIGHNGCKIPLFKTLMTNKCKNDCKYCINQSKRNFTRLELSPEELARAFLGYYNRGLVNGLFLSSGISDDVDSTMEKQIETVSLLRKKYGYDDYIHLKVIPGASRDSIKRAMALANRVSINIEAATSSGLAELSSTKDYNKDILKRLSWINSLQHKSTTYPNSTHTTQLIIGANNETDKEILSRMEKIYKKSDLKRTYFSAFTPIEETEFKNKEACSTDRTSKLYNADTLINSYKYNVKELIFDESDKLSLTQDPKILAAKNMNIFPVEINSAPIRELIRVPGIGVKSAHEIVSIRKKKPFTHKEQLQELGVITNRADPYIKINGEYQTTFNF

SEQ ID NO: 11717 - protein, 206 aa, Methanobrevibacter gottschalkii
MARKSLGKGLASLIPDFYNEDFDSNSTQSLEDIMNETENNEEIKDSEEKNAPKEKSSNDVNNNSNEEEISKDETLEESGNDETQKNIFEEIEEEKNNQEKSIDSNETTLKEDVSENIKESENISIQNNEKNTSTTQETKIQEHIVEVKEIVDKNPRITLWSSRSSAVFRYLRKTEPEFSISKEASNLIEEAVAKKYPEIWALFDDY

SEQ ID NO: 11718 - protein, 280 aa, Methanobrevibacter gottschalkii
MSEIIAVMNQKGGCGKTTTVVNTATSLAVMGKSVLVVDMDPQANATTSFGIDKTKIENTIYDALIGDISVKKATIPTFIKNLFIIPSNISLSGAGMELSRRENYHIVLQETLKDVVPLFDYIFIDLPPSLGVITVNALVASDSVLIPIQAEYYALEGVADLINTIKLVEKRLRSPTPIKGILLTLFDKRTRLSKDVRKELKNYFGETNLLFKTIIPRNIRLAEAPSFGKPCLIYDPDSTGTKSYLKLAKEIIQRDENVQLNIAKTNIDKVKKDSEVAGGK

SEQ ID NO: 11719 - protein, 433 aa, Methanobrevibacter gottschalkii
MDYKITLNSNEVPKKWYNINADLPVELPMPKNSEGNDQISSLQKAFTKVGLEQEFSTERFIKIPKDVRKLYMQMGRPSPLFRATKLEEYLDTPAKIYYKREDTSPTGSHKLNSAIPQAYFAKKEGIERLTTETGAGQWGTALSLACNLLDLECTVYMVKVSFQQKPDRKSIMNIYNGNVFASPSENTKVGREILAQNPNHPGSLGVAISEAMEEALENEKVKYTLGSVLNHVMLHQTIIGQELKKQLEIAGEEPDIMIACAGGGSNFAGSLFPFIKDKIADKSDTQFIAVEPSACPTLTKGSYEYDFGDVNGFTPMLKMFTLGHDFVAPSVHAGGLRYHGMSPQVSLLTKEGYIEPRSAHQRDVFEAGITFARNEGVLPAPETTHAIKVAIDEALKCKQTGEEKTIVMNFSGHGMLDLKGYASYFEGSMPNSK

SEQ ID NO: 11720 - protein, 357 aa, Methanobrevibacter gottschalkii
MYTLIINNIKNNKKIMRILAIDVGTGTQDIMIYDTEKELENSIKLVLPSPHLFISQQIRDIENDIYFEGEIMGGGKIKKSIIEHIEKGYEVVMEPTCAKTIRDNLEQVKSFGIKIADESKKYRNYTKIKMGDINITKLSKLLLDYDLEFDFDKIAIAVQDHGYSENMGDRDFRFEKIREKISKPMSPLEFGFTDDLPEYYTRMNAVRRIVKHEGIDEIPLIMDTKFASIAGMCFDEVAEKLESYIVIDIGNGHTTAASIDEGKIQGVFEHHTSSLTGESLERYIKRLADGIITNEEVYNDHGHGAHVLNPISEIEKVIVSGPKRELIEKTNLDWHHAAPGGDVMMTGTVGLIKTILG

SEQ ID NO: 11721 - protein, 219 aa, Methanobrevibacter gottschalkii
MFKMDSHIHSEYSSDSNSKIDDILKKANKENINIISISDHDTVDGTSEVMRKTRNTDILAIPSIEISSSKGHILGFGCEEKIPKDLPPQETIDRIHDLGGLAIIPHPYCFYRHGLLCKSDNEKLKIDAIETKNARFIVGYCNRKARKLSIKKNLPALGASDSHYWKFVGDCYSLIDCEKDIDSVLKAILKGKVKACGKGTSNILLSKYLLEKNLLKKFK

SEQ ID NO: 11722 - protein, 91 aa, Methanobrevibacter gottschalkii
MENNTIFVGSKPVMNYVLAVVTQFNEGSDSVVLRARGKAISRAVDAAEIVRNRFVPASDVTDIKISTEEVENYNKEKTNVSIIEILIEKGE

SEQ ID NO: 11723 - protein, 513 aa, Methanobrevibacter gottschalkii
MNAKNIETLKKENMNLAEKIYIFDTTLRDGEQTPGVALTVDEKIQIAQKLNNLGVDKIEVGFPASSPGEMESAKRIKNRELDSRLVGLARSLTGDIDAVIDADLDYIHTFIGTSPLHRDYKLKKSKEDIIHSSVVAIDYAKDHGLTVEFSAEDATRTERDFLFEIFNEVVDAGADFLDIPDTVGVLTPIVTRELITDIKNNFKTPISVHFHNDFGLATANTLTAIECGANQAHVTINGLGERTGNCSLEELVMALKSAYNIDLGLDTTRLYSLSNLVGRLTGVKMPVNKPIVGDNAFAHESGIHVHGILNNASTYEPMSPEMVGHSRKIVLGKHTGANAVKAKLKEHHIDLNEKQFDKVFKNIKSLGDNGKCVTDDDLIAIAITELASARETPIVIKGLSISMGANVSPTATVKLEIDGVEKETASTGVGPVDAALNAIRELIQDTMDIELEEYNLEAITGGTDALAEVFVISSDSDGNKSTGRSTNQDIVMASILAVLDSINKLLLINRSIL

SEQ ID NO: 11724 - protein, 401 aa, Methanobrevibacter gottschalkii
MYKKLFIGILICLLVISPIAAANWNSFAGGVDHNAFREESSDFVTNLWTFNMESPIHSSPAVYKDFIYVVSTQGILKVINMETGEKDWDFDLESNTNSSPIINSNKLFIGTEDGIKAININNHNEIWDYDCDDVESTPFLYKDTIYFGSDDGHLYGLDKDNGKVVFNKKLDGELKSSPIVVDDTIYIGSTNCKLYSIGTDKDKNWEFTTGDEILSSPSFINDTIVFGSNDGNIYCLNESDGALNWKVDLNNKVLSSPTVDNHDNNIFIGSDEGNLTCIDNRDGTIKWSHSVGGKIQSTPAIKDNLVVFGSDNGNLYVLNKYTGSEEFTYNPGTILFNSAINSSPVINGNSLIFGDDSGNVYSLNIDKHEVPGSTQMYFSISVLIIIVIVALVIVHKVKGRK

SEQ ID NO: 11725 - protein, 384 aa, Methanobrevibacter gottschalkii
MLEFKKFWWMIKKEVLSLKRHPARLVSIIAFPIIMILLFGYGMGGEMTDLPILVVSQSHGNLTDLTLDTIKTTETYKVIEVIDDLDEGKKRVDSGEVKAAIILPSDYDDNSTQQKSVTLYLDSSDQMASQILDSSTQAIFSRLSNMVASQTNVENKDANINPSISNSFNNFKDDISLHINRIYGNIKYIDFLVPAILGMTVMMSCMMGMGATIAGERETGELARLFMTPTSVSTVIGGKIAAKLLIELLRALILIFMAVLLFNVSIKGGILQTFIVLVVGALCFVGFGMMLSARTSTQEDYVQMVMPFSMPMMFISGVFYPIETMPWILQKLAYIFPLTYLNDAMRGIMLKGQTLGDVWLDLAVLLGFTLLFFIIGVKRFNRDV

SEQ ID NO: 11726 - protein, 348 aa, Methanobrevibacter gottschalkii
MKNAIETNNLTKVYGNFTAVNSLNLKIPNNSIFGMLGPNGAGKTTTIKMLTCLIQPTSGKAVVGGYDVEKNPDEVRNLLGMVPQQVSLYKDLTVMENSQMCADYYGIPSDERDARIEDLMELVDIKYAKNKRVGQLSGGQKQKASLVASLVHRPDILFLDEPTIGLDPTTKRTLWDLIRDLNDEGHTIILCSHDMHEVDMLCDNVGIINTGNLVAYDTPQGLKDSLLEANKKKMTEALGKISDETKISTSTKEDIGNLGLRKMSILLKNQNEEIIEAIKTSDFVKTVEIAHNGRINLRIDSYDDMAVQNVLKDINSFGGVIKSIYTEEPSLEDVFIKATAEVDENARV

SEQ ID NO: 11727 - protein, 135 aa, Methanobrevibacter gottschalkii
MTDKEIYDTQTMLIKHYSNGLTRNLILWIISKEKIHGYGIMKKLDEFFNFEDVNYEIKNTSSKVYPILRKMEKNGLIIGEWDINENNKRVKYYSITDEGLIILDKIRSIINFISNNPAWLNFYGDMGVEINEKRN

SEQ ID NO: 11728 - protein, 237 aa, Methanobrevibacter gottschalkii
MKLGFTTLALFMEDNNKIIELAKQHGFEIIEILGEDPFYEKDKGEFKNCGIDMRIHAATVDINIASLNKGIRTESIKQMIQCGHYAESINANTITLHPGIIGRNEPRLRKWALEIAVESIGKIIDNTNIEISIENMPVRGKFLGNKVEEIEMIQEETGCSLTIDTGHGNTCGNLEEMLNLKNISYCHLNDNNGVKDQHITLGEGTLDLNLLKKIDTAIIELNNFNNILKSKKVIENL

SEQ ID NO: 11729 - protein, 264 aa, Methanobrevibacter gottschalkii
MKKAVVFDNSGTLIERYRVIKDVLNGNLFTDINSLDLIDAADALALVVLQFNTNKLLDLDQNTLISGVIREYNIDFDVSFSTNPISKAEVKEIIDNEKSATIADITDGFDILRDKVPNMELCNGSALIVDMDLGVIAYTITSAGKFFPKVFETIETLKSRGIEIFIASGDRKGAINRLANLLDIPEDNAFGTVSTRGKCEVVSILKDSGYKVMMVGDGINDLLAFKNADVSVLTIEQQEEISPKVMDKTDHIIEDIFEVTMIDF

SEQ ID NO: 11730 - protein, 456 aa, Methanobrevibacter gottschalkii
MNVIEKLNSIKNGEITAKENVENFIKVIDENNESINAFIELNYENALKQADVIDAKIANGEDVGALAGIVFGIKANINVEDLIISAASKTLENYIGSYNATVVKEILDEDGIIIGILNMDEFAAGSSTETSYYGPTQNPAAMGRIPGGSSGGCAAAIAGKMCDISIGSDTGGSIRNPASHCGVIGFKPTYGAVSRQGLLDLSMSLDQIGPLSNDVSGIALTLNTIAKYDETECTTLNWDKPDFTNVLDDTSLKGMKIAVCKEFIDVTDDEINKTVNQAINKLVEAGAELVEVSFDYINLCLPTYYLINYVEFFSATRKYDGREYGSRIEEVCGDEVLRRIKIGSHIAEAEFSGKYYKQALKARSVIRSEITSMLENVDLIVGPTVPKLPHEIGAELEPMEMYAYDILTVIANLAGIPAASIPAGEVDGIPVGLQLQAKPLDDLKIIKAMSVFENTQ

SEQ ID NO: 11731 - protein, 501 aa, Methanobrevibacter gottschalkii
MTRIGLVYVNGAVPGFEDFGNLPTDIVKENGLIDGFKASNELDALIIPGGTLIESNDINMDLNTEIKKMASDGKPVIGICAGFQLLSNQIDIGRKSPVPIVKEGLGIIDVNFSPLITSDRVKAKVFNNSFLVKGQKEDVDGFHTHTYGKVEGDAKPLFYSQVQRMNYGDTNKNGEYNIFSGACNDDGNVIGTMIHGILDENPILIKNLLEQIDAANIDDIYSRNIEIKKYLQSEVGINTNIKVPKLDIKCKKPKYLMIGSNGSDSGKTFIVTGLAGALRRRGYKVALLKIGPDVRDIIPGLYLTKGKMEKFSSIKIGHLGWSDIESTISKLNSSNYDIVLIEGVMSVFTGLLNEKVPFSAAEIAMSSKIPMILISGVNKGGIESAAVDLVSHSNMLEKFGIPVKAILLNKVYSEDIFNEVIPYIKNNTTVDTVLKLPKIKSADMRGFIPEVEIRYELFTNHAMDLIENNLNIDEIINMAREVEFEKIYNFNEIKNKMVNGS

SEQ ID NO: 11732 - protein, 227 aa, Methanobrevibacter gottschalkii
MNQETNLDKALEAIRNGEFVLVFDDDDREGEVDMIIASEFVTPKSIATMRDNAGGLICNCIHSDFCDEIHLPFMVDIMEAASEKYPELAKLAPNDIPYDERSSFSIWVNHRKSFTGVTDHDRAMTISECAIMMKEGRFDEFGSTFRSPGHVCLLRGADGLVKNRRGHTEIGLALCEMAGVTPVCVVCEMMDGETGQATSVADARKFAQENGLILLKGEDIINKYLED

SEQ ID NO: 11733 - protein, 126 aa, Methanobrevibacter gottschalkii
MKIDGEVTTGLGKAAYFLSQEFYTNEFKKNLGFVPFPGTLNVIVSDNYLDEINEIKNNCKNLIKPDKGFGAVKYIKAKLNDNIDGAIVFPAKTTHEENYLEFISKNKLRDELALNDGDIVSLEFQN

SEQ ID NO: 11734 - protein, 547 aa, Methanobrevibacter gottschalkii
MKIKTISTDVLIIGSGGAGSRAAIEVDNAGLKAIIVSKGLSFRSGCTGMAEGGYNAVFKTVDKDDSKEAHIYDTLKGGSYLNDEKLVEILVNESPQRLIDLENYGALFDRQESGEIDQRPFGGQTYRRTCYQGDRTGAELLNALKEEIIKRDIECIEEVMITSLITDKNQVIGATGLDLKDSSLIYFKAKSTILASGGAGQLYPVTSNTFQKNGDGYAIAYKAGAKLIDMEQVQFHPTGMVAPESKKGVLVTEAVRAEGGKLLNKDGARFMRKYAPEKMELATRDIVARSIYQEIIEGRGTEKGGVYLDISHLDDDYIDEKLETMVLQFNNVSIDIKHEPIEVAPTAHHFMGGLKINTDASTSLRNLFGAGEVCGGVHGANRLGGNALADTQVFGKIAGESASKACADTEIKTDYEQVKRESSRIENLIKKGNIKPQKFKENIKNLMWEKVAIVRDEKTLNEGLKDLQDMQKELNNLDVSDKKQYNTELVTALEVINMVEICILIVKSAILRRESRGSHFRSDFPESKDEWKKSIIFNKDKIEFEAR

SEQ ID NO: 11735 - protein, 434 aa, Methanobrevibacter gottschalkii
MNDNTILIKNALILSPNTNFENKQSILIKDNLIAEISPDIDESNVSKIIDATGKILLPGLINTHTHLSMTLFRGLADDLSLDSWLNDYIWPMEANLNGDYCYIGALLGAVELIKSGTTTFSDMYFYMEDVARAVDESGIRAVLSYGMIDFGDEDKRKNEINENLELFKSCEGMGNGRIKVFLGPHSPYTASEELLIQVRELADEYDMGIHIHVSETQKEIVDISSEKGLRPFEYLDKIGFLGPDVVAAHCVWLSDNEIEIIKKNNVKISHNPCSNMKLASGIAPVSKLIENDICVSIGTDGASSNNNLDLIEELKTASLLQKVSTLDPKVLTSDETLSMGTIKGAETLGLESEIGSIEVGKKADIILIDTNSANMIPDSSSLSSNIIYSANGLNVDTTICDGKILMENKKLTVLDEGEIYQKARQAIKELKEAI

SEQ ID NO: 11736 - protein, 68 aa, Methanobrevibacter gottschalkii
MSEIPKAPVARIIKESGAERVSEDAKAELAAYLEDVARNVAKEANAVAKIAKRKTVKAEDIKLAIKNL

SEQ ID NO: 11737 - protein, 287 aa, Methanobrevibacter gottschalkii
MMKIKIAIPSKGRISEPSINILEKAGLGLIDKNNRKLISKTFNEDIEVMFARASDIPEFVNDGVADMGITGVDLINENEADVIELLDLRFGQTKLVLAAPEESNINSVDDITEEMKVATEFPVLTKKYLDKKGLSLKIVKLSGSTEAAPFIGIADLITDLTSTGTTLKMNHLQIIDNILDSTIKLIGNKYSLKNKKELIEAVSTSIKGVLDAERKKLIMMNVKNDDLDKVKEVMPSMGGLTISEVLSNEKTVAVQAVIDEKEVFELVNCLRNAGAKDILVVPIERII

SEQ ID NO: 11738 - protein, 164 aa, Methanobrevibacter gottschalkii
MKIGIIYSTSKKSTKKACKILASKINTDVQLIPIEKAKTTCILKYNFIIFIASAYNGKFQSSLKRYIIRNIKTIKEKPIALVINSEENINTEDIFNKIFTEELVNSSCINSNFGYELNINEGNFFEKIKTKNKIKNKENLPSLNIDEINKFSDYINNLIEKRVD

SEQ ID NO: 11739 - protein, 311 aa, Methanobrevibacter gottschalkii
MIKIFRLKNIISVKDFERKDIEYILDEASKLENIAKSREISEELKGKILGLMFFEPSTRTKMSFETSMKRLSGECIGFENSGSSSVSKGESIADTAKMFEGYCDALVIRHELEGVSKFISDIVDVPVINAGDGAGQHPTQTLLDLYTIKNEIGEIDNLKIALIGDLKFGRTVHSLTHALGLFKNIKIYLISPPELKMPQEVLHDLNKTNVEYKEIGSIEEIIDDVNVLYVTRIQKERFADINDYLKIKGAYIINKNMLEGKDLIIMHPLPRIDEIDTNVDNTKYNKYFTQAANAVPVRMAILKTLIKNNPK

SEQ ID NO: 11740 - protein, 387 aa, Methanobrevibacter gottschalkii
MSNIFEDLENDETQGPTIFKDKRPLDHRWLPDKLVHREEQIRQIAKNWIDVLSNVTPSNVTLYGKTGTGKTAASKFAREQLIDIARKKNIFVKVEYIRCTDYTTEYQVIAELCNKLGRDVPNRGWTKGEVVNTFRDIFKTNAFGKKLHLIVILDEIDILLDKDGDGILYTLTRTENVSVLCISNYLDFKNLIKSRVTSSLNDKEIVFPPYGADQLSDILKERAELSFNENVLENDVIPLCSAMAAKEEGDARYALDLLKNAGELAFDEDSEKVTNNHVKRAKDKIEHNKVIEIISTLPLQQQRVLESILNLTKQKEEITSGKLYEAYTDLYKKDAVTYRRIFDFINELEMLGIISTNTISRGRGKGRTNIIKLQCDETLLETTLFSI

SEQ ID NO: 11741 - protein, 152 aa, Methanobrevibacter gottschalkii
MINEKTIEKWLLDEDMLREMKFDENADFHFIIEFPKDNIIDIVKPKQKDCIVFACATQVSQEHINLMVSADLKTKKDFILELNFGLNNFLVDYELQIHDEMLQQFIITDQIFEDGLTKDNFIKTIKRVFKSKLHCIWLIEKKFNNPSFSPIK

SEQ ID NO: 11742 - protein, 344 aa, Methanobrevibacter gottschalkii
MVYNELINNINLININNIISFYLFLFIIFALLLSLVIDVLFGELPGKIHPVVIMGSLINFFKKKFINIKNWASGLMLVLCTSVISSVLLLIIYTIIKNNIILLFLVFSILLSSTFSVKMLLQTAIDVKNDLDNDIKKARKSVSYLVSRNTEDLSECFIVSAVIESLTENITDSYVAPIFYYIIFAIFILFYPVHLKLYLLLLVPMLYRLSNTHDAMLGYKTQELIYIGFLPAKIDDILNYIPSRIAGLFIVMSAYLLNLDGKNSFKIMMRDARKCPSPNSGYTMASTAGALNIQLIKKDTYILGDNNKIITANDISSAVKLSKLSIILFTLTIICLFILIYVIL

SEQ ID NO: 11743 - protein, 337 aa, Methanobrevibacter gottschalkii
MKLAIISVSNKGQKLAFKLKEKLNEDSTILKVDLYHKNVKKYFQILFYEYDAIIAIMASGILIRTIAPLIESKVTDPAILNIDDNGNFVISTLSGHLGGANKLTDKIANLIDAIPVITTSTDVNKKLGIDILAKDLYLSINNTKEILFFNKSILEGEQLNFTINPNKNFDYLFNYLKNITLEIDVSFSYSNNINTDEIHVKLDNHKIILKERKIVVGIGCRRGKECSDIYKSLIKSINELNIDKSRINMFSSAEIKKNEQGILELSDKLNIPVNFVELDKLKLFESNDIQKSEFVYSKFGIYGVCEPSALITAGFDSKLIYKKTSYDGVTISIALSK

SEQ ID NO: 11744 - protein, 81 aa, Methanobrevibacter gottschalkii
MSSQIDEVCEILEYIADNNTVPRNIREAAGKSSTLLKDEEQDQSVKISTVLGKLDEISNDPNIPVHARTLIWEVLSKLESI

SEQ ID NO: 11745 - protein, 58 aa, Methanobrevibacter gottschalkii
MSDISRTTINLPVDLKKELKKLAIDEDTSLSGLIIKMINEGMENRKNSNISYSDEDNS

SEQ ID NO: 11746 - protein, 193 aa, Methanobrevibacter gottschalkii
MKKHINEIINVSNEIYNKGLVSGKAGNISKRIKGSTGDIVAITPTLKSLSYLKEEDIVLVDMDGNLLTRGKPSSELNMHLEIYKKRSDVNAIVHTHSTYATGFAFSSKKLKRLEGFGEIKNPYLNSIEYFKPGTSELAKNASEGIKNEDVLILKNHGVICVSDKLKEAKLLSIFVEESAKTQFVTCMLNSVED

SEQ ID NO: 11747 - protein, 573 aa, Methanobrevibacter gottschalkii
MSTNKILLKFAKKGINLSPEAYNKVINAKDPINYASSLIVKLKSDKFSPKDLISVSGEMVDEINGIKKEESNNQKSLTEDITHNEEIKIKKESIKETPSEIQPQIKVDTKAENKQDLSIIKKEDTIDNLKKESDTPEKYINKEILEASETIKDEKIKFKRNEQKTNVKYDFKIIQDTSKKSYTSGEIENLISYFKSRYEKLSNILSKRPELRNYTKIADIDDSQENLSLILMVREIRTSKNGHKIIEFEDDTGTISILFSHNNEELFAEAEKLVKDEVIGVIANKSDDPGFAFGQQIIDPGVLRVPDKEMDFGIVFLSDVHIGSLTFLEDAFQRFIDWINCEYGSEEQRRIAEDVKYLVIGGDIVDGIGVYPNQDKELAIKDITEQYNEAARFLGNIRSDIKIIIAPGNHDASRVAEPQPAVPEEYAKALYELDNVEFISNPGVVSLDGINVLIYHGRSFDDLVMAVKQFTHERNDLLMEELLKKRHLAPIYGERTPLASELEDYLVIDELPDIFHTGHVHINTYKKFKGIHLINSGTFQTQTEFQKIYNIEPTPAQVPVIHKGKYKHLKFIE

SEQ ID NO: 11748 - protein, 166 aa, Methanobrevibacter gottschalkii
MANKFVRIILIVVLFVIFFEVGLFSSYTIVTAEAPNIQGLIDMQIQKISSILNPETVNEALIKDPTPINITNKKDVALKMQDLSKVDGVNVDSMNISTRDNPSNDKNFTVIIEALGYASPNSTSGQIIISQEPSYKIIASAPASYRGEGIMADTNSMTITSVLKLY

SEQ ID NO: 11749 - protein, 357 aa, Methanobrevibacter gottschalkii
MIYVIGIGQNRENMTLGALKAIEESDVIIGYKKYIDQIEDLVQDKEVIKKGMGDEIARAEFAIQRSLNGQNVSLISSGDPGVFGMANVLYQIVSKYEGVEIKVYPGVSALNYASSHLGAPLNDFAAISLSNILTPLSEIEKKLEYALKANLVVAIYNPISKTCKEPFKRFKQCVFNIKGEDALIGIVDSTYEPPKASIVKIKELTEDMVNMSCTLIVGNDLTYVQDGKLVTPRGYVIRSKIHELSRNHYEKFLNGEIANGPNSECEFYPCHYEGQYCDFCYCPFYPCGDSSTGGEWIKGKNVWNCKNCIWLHNKESIECLRPPFENILEDIEDLKSKKKTLLKLRRACLLKNNPNNL

SEQ ID NO: 11750 - protein, 200 aa, Methanobrevibacter gottschalkii
MSIKNLLIEMKNMSELMVDLAYSAVLFNSKDAAEEVITLENEVNSMNYEIKKESLVAARSYEDAEKLTALLEIAEAAESMANAAKDLADLVITGFKPHPVFKMVMEESDKSIVRVTIDESSELANNTLGDLLLVNRTGMRVIAIRRGVSWIYGPDKNTMLLANDVLILKGTYEGAELLEKLASGACSLEDIPEELEEELE

SEQ ID NO: 11751 - protein, 423 aa, Methanobrevibacter gottschalkii
MIYVKKQQKKIRSSLSTRTFSEFFSEHDYVIKEGLIALLICAVGDLIAGIVLGKMTFFLESFPGLLVVIPGAIGMRGNIFGSFASRLSTSLHIGLISPHFEFSDDLNNNIFSSFVLTLVLSIFLGIVAKIFCILLHYHSMDLIDFILICTIAGLISNLIMLPITMFISFKSFEHGWDPDNITSPIIAAFGDLFTLPAIIVSIFILKSLNFNLIVKDVILAIILIAVLMSFIHCYKLSYETKTILRQSTPILLLCSFLGGSAGGILNSSVETLLSNPSLLTLIPLFSGESGSLISILGARISSGLHSGLIEPLSKPEGETIHNFGICYILAIVIFPLIGILAETSSISFGTIGVGFDKIILISGLSGIILVTVMVFLVYYISTSSYNNNLDPDNIVIPISTSVTDSISSLILISMSLLILGTLI

SEQ ID NO: 11752 - protein, 288 aa, Methanobrevibacter gottschalkii
MDNTGNMTIEITVVLLIVLLIISVTITSYENITDKLIKTQEKENMEILTSEIVDNLINNPGVPEKWFEYGKGTPGLAIINEGGEIIPNSVSYSKLISLKENYKKLVDDQLFKSKFHSSMELIPQKRTISSVKIGSNSESNNIFSVNRLVKCDFYKKYVLKDFKNDGKCNHNHDQKYHSCNYFKIFKGNLKNSDYYLLIEDSEKYDLKYIVDTTRVVKEKYWENAISNKIYLNDKINFYDDTSAIVFIHFNKPQSKVVLVSVPKNFDKNKLNYDYFITNECQFVLKVWY

SEQ ID NO: 11753 - protein, 312 aa, Methanobrevibacter gottschalkii
MKINSKGNLIVGTTAILIIALLFICIFVVTSINYIQNKNIGIESNDNFKYIIDDYTQNLELNCRDAIDEATQKVFNGLPVTNSENQIKKNLNKILDKKNKEYEEKYDVKINSETLSVENTKSPWKILFKIKLNIKKGDEKYSKIVEKNASVEGLRDPLPIAKLTIMSGILTYDNQIHYKTALSTYMLLHHLDSPESYIEATAPLYIKKCPYDPYIHHGDPGVIEDCLKHGYFHESADGSCYLCRLEGKGKCPHYGLEVFIQTHTPLKNESLSCPDHVVFADHYNGEKINPDDWNSLILDSSHRKKYGLINDG

SEQ ID NO: 11754 - protein, 132 aa, Methanobrevibacter gottschalkii
MSDTVRTWRHIQQRYNLIGTKCNTCGELFFPSRVVCPNCRRKGDLEPFQFSGKGKIYTYSVIRSAPDDFKKSAPYAVAVIELEEGAKLTSQLVDCDVDDLEIGDDVEMVFRKIREDGKDGVISYGYKFKVIK

SEQ ID NO: 11755 - protein, 299 aa, Methanobrevibacter gottschalkii
MDTNSKLSNNAGVILVSHGSTLPFAEEVFTEIKEKFIKKSGLATEIGYMKVSEPTIAGAVEILKEQVDDLDKIIALPVFLAPGIHTNIDIPQLLGLEPLEVDPRCPDGKYPAEHYLSIADDVDFDGEIRLLTSIGPRDELLDIIDKRINEALSESKLDDSAKTGILLVTHGSRLHYNKEFATELYDKFKKTCDLPSSFGFMELCGPSIPESINKLADENRLERLVVVPVFIAPGMHTTHDIPHILGFLDDHDHNHEDHGHDHTHDLTPVEFDGEILYPEPIKSDDILIDMLVAMVNEAL

SEQ ID NO: 11756 - protein, 159 aa, Methanobrevibacter gottschalkii
MSDKKTGILLLSHGSRLEEGKKVIEAYKNMYLEEFPEAIVDYAFMEIRKPGIPETIKKLTTENDLEKIIVVPVFVAHGLHTKRDIPDLLGIESDFDIEEVSCHHHDHGHSHGHHHHHHEHSHEEEEEEFEFDGEIILTDPLGVDKRMYEIIKDRVSEHL

SEQ ID NO: 11757 - protein, 141 aa, Methanobrevibacter gottschalkii
MIGRQTININKSRELEELYQIMEKKWDKEKYNTFFLGKPNPLSIEKYICLPATQRYMIIAYPRKGGKFFSRNDKVVLTICDTPDSMKNQIVTSLARDNIFKLTYQISESKSRNEERKGPTEETLQGYTAYMKQILEEEDLL

SEQ ID NO: 11758 - protein, 341 aa, Methanobrevibacter gottschalkii
MLFILLDYMILFLRQLKFIQRQNLFILKVILIFMSLKVSDIGEKELVRYIIANSKKITPDDAAITPFYNSNLISTCDMLIQSRHFPKNMSYYDMGFKSVTVNVSDLAAMGAKPLGFLLSMAIPKNLEVDNFKEIVGGVLKACDYYSIPLIGGDTNEASEIIISGTALGLCDNPLMKNNYKKDDLIAITGDIGLAALGFEIDDLDSIYVKHALRPKARINEGQILKKYGATSATDITDGLASELYEIKKDGFGFMIHEELLGITDEYKNLASNLNLDYLDLVFHIGEDFELLFTISKENLEKLPIEYKVIGIVSDSDVIELTLENGFVEQIKNKGYEHYVGE

SEQ ID NO: 11759 - protein, 290 aa, Methanobrevibacter gottschalkii
MLVSNDLYKKSSKTQKIRCEICANYCKIDEGNVGICHQHKNINGELFDESYGIVSSLSPDPIEKKPLNKFLPHTSTYSIGGFGCNMSCLHCQNYIISHEYGNYSRGIKITPEEIVENAINYNCKSIAWTYNEPTIHLLFNRKTSLLAKQKNLKVIYVSNGYFSEKSLEEVLCFVDAFNIDLKSMSSNFYKKVCGADLDIVLDNLKRIYFENKHLEITNLIINEFNDSIDEITQLCDFVVNELGPEVPLHFSRAFPYYKMNDISPTNTETLFKAKEIALKKGIQNVYLGNI

SEQ ID NO: 11760 - protein, 417 aa, Methanobrevibacter gottschalkii
MILKDKNIIEITEELSSEFEVAKVLRKYPKDTVLIKNVKGFDIPVISGICNTRDKIAKSINCEVSEITEKIIEAMENPIKVDKFTDFSDYDSLDIDLNKIPILTHYTRDGGAYITAGVVFARDPVTGIQNASIHRMMVLDNKRLVIRIVPRNLYTYFQNAQKAGEDLQIAIAIGMDPAILLASTTSIPIDYNEMDVANAFKNGELELIKCGELEVPQADIILEGKISVTETIAEGPFVDLTDTYDIIRDQPIINLEKMHIKKDAAYHAILPAGFEHKLLQGLPQEPRIFKAVKNAVPTVENVVLTEGGCCWLHSVVSIDKQTEGDGKNAIMAALSAHPSLKHCVVVDTDVNVFDAEDVEYAIATRVKGDRDIMIVPNVRGSSLDPVAKSDGTTTKIGVDATKSIKTLEKFERVSFSE

SEQ ID NO: 11761 - protein, 341 aa, Methanobrevibacter gottschalkii
MTPKIMIILGSGSDIAIAEKSMKILEKLEIPYSLKIASAHRTPDLVREIVIQGTNAGIEVFIGIAGLAAHLPGAIAAYTPRPVIGVPVDVKTGGVDALESIVQMPYPSPIATVGIDRGDNAAILAAQFIGLHDDEIRQKIINLRKNYALKVKNSNEEIIQKIEDKKFLQNDFLRIKDLNINDIEADESDPCCKNKNADVAIIVGRQTDVVTAKKVAVILDRLKISHDTKVVCPIRSTKKFTNYVKAMKNAKIFIGISSNSSQVTGGIVGLTDRPVIGVPCTNENGDDYMLTTVSMPPGVPVATVGINNGKNAAVLAGEILSINNPSITELLGKIKNKKINL

SEQ ID NO: 11762 - protein, 729 aa, Methanobrevibacter gottschalkii
MKITLIYLIKLREKMIAKTLEKELNLSNWQVKKVIKLIDDGNTIPFIARYRKDVTGSLNDATLRKFDERLKYLRNLEEKKEKIIKRINELGKLDDNLKNKIQNSKTLVELEDLYRPYKSKKQTRATKAREKGLESLASIILKQEIKENVKNIAKNYITDEVKTLEEAIQGAQDIIAEEISNNSEFRKKIRKNNFYTGQIETKTKNKDESTEYDLYYDYAENIKKIPPHRILAINRAEKEGIIKVKINCDNEEIIKYLNRHVLKNISGIPEKIEYNPYTTQIIKESVEDAYTRLISPAIEREIRNYLTKKAEEKSIEVFAKNLNQLLMESPLVGKTILGWDPAFRTGCKLAIIDKTGKVLDTELIYPTQPQNKVTESIKTVKDLIDKYSIDVIAIGNGTASRESEEIVAKIIKNTNVEYIIVNEAGASVYSASKYADEEFPDFSEGERSAISIARRLQDPLAELVKIDPKSIGVGQYQHDMNQKQLNETLTGVVEKVVNEVGVDLNTASVSLLNYVSGIGNTTAKNIINYREENGSFDSRKELLKVKKLGKKTYEQCAGFIKVNNPKYPLDNTTIHPESYDAAYKLLEKLNYSIDDIGSSNLKLDNINLEEISVELDIGQETLKDIIKELRKPGRDPRDDMPKPMLRKNVLSIEDLEIGMIMQGTIRNIVDFGAFVDIGVHQDGLVHISQLVENKFVKHPLDIVSVGNIVDVKVLDVDLKRNRINLSMIL

SEQ ID NO: 11763 - protein, 565 aa, Methanobrevibacter gottschalkii
MYWFFVILSFLLAGIKTQKPNKYKKVSVIIPAYNEEETVAKVVNVVKKVSFVDEIIVVNDGSSDNTEMEALKAGAIVINHEVNKGKGEALQTGYREAECDIIAFIDADIYNLTSSKVESMIKPILDGGADITKTKFSRASGRVTELTAKPLLNFFFPEISFEQPLSGQFAARKEVLKKINFESDYGVDVGIVIDADVLGISIMEVDIGAIEHDMSPLSDLNLMANEVVRTIIGRANKYGRVTMIDDIGYYIRMSIVGLSLVILGLFTIFFVKFVPLAIGVIISIIGLLIAIFYIFKVIIKSIVMFKKTPGRNLLKSFVKIHFPMIISIIILLLMISTFLGAAHFDHGVLSIEPNSRNLIIYADDSPRDTISVRGPYTIDTAIENESGQIRMPSDAMMTLGVNINDTIKLGANTYKVNETRLGEPDILRLPIEVKKLLQVENGEVIQNSRLKDVFDGSLITHAYEYNNTTIKEKYFITSNEKQSSTYEIFLDNESIVNSYGTFKDNGTYDISVDGNYLTSFSYKNNLTKSFKFDGHDLEIVFRDTNSTSIKQFSSGNQGVFLNFNF

SEQ ID NO: 11764 - protein, 311 aa, Methanobrevibacter gottschalkii
MEILKPNELRERFNDPWIAPYKKVLTMVDGNKVEIVEYHPCISGSHWLLNQYLNNSELIDSAYRDGNKHVYKCHVGKAPLDLKASFNAAGIDEIVVADDEVKVTHSGLAGAGVGAGMCRGMGEGVKYIELIQVGGGSKAGKATVVTPKLNKIVIGVDDTDVKDAGATWTMAHNLGVELANEGFEYLDHIIVQLYPHNPHKTQNCVSIALTFAVEESKKEKLIDRVIEILKRDTLSDKTAIAILEGLDIPEKLRKYSIATKSGMMDIETAESLAKELNIPLIAVTGEQGKVGALAALGLYDDVEEAVKAYDK

SEQ ID NO: 11765 - protein, 140 aa, Methanobrevibacter gottschalkii
MAKYEIAAVVAEFNYDITQMMLELAKAEAKNRGCEITKVIAVPGVFDMPLIIKKLLKSEKYDAIVTLGAVIEGATDHDQIVAQHASRKIADLALEYDTPVALGITGPGMTRLDAHRRVKNAKSAVEAAIKMCDRLSELDE

SEQ ID NO: 11766 - protein, 33 aa, Methanobrevibacter gottschalkii
MDFKKLTKIQFAALFIIFIMVLSGVAGFLLYII

SEQ ID NO: 11767 - protein, 335 aa, Methanobrevibacter gottschalkii
MNTSKTKDKYKIAVIPGDGIGNEVMEAAIYVLNALNINFDYVYGEAGDECLEKNGTALPDETLDIIRNSDACLFGAAGETAADVIVKIRQEMKMFANLRPVKSYPNTNSLSDNIDFMIVRENTEGLYIAGEESYTDEGAVARRIITREAEKRIIEYAFKYAKENNKSKVTGVHKANVLKKSDGLFKDVFYEVAKRYPEIATEDYYVDATAMYLITKPESFDVIVTTNLFGDILSDEGAGLVGGLGLIPSANIGEDAALFEPVHGSAPDIAGQGKANPIAMMLSAIMMLRYLGENEAANRFDGAILKVLNEADILTGDLGGSATTMELAEEVKNNL

SEQ ID NO: 11768 - protein, 159 aa, Methanobrevibacter gottschalkii
MKGTAWKFGNDIDTDIIVPGRYLIYTNEERLSQHCMEGLDPDFNKKCKKGDFIVAGTNFGCGSSREHAPIALKGAGVSAVIAESFARIFYRNATNIGIPLLEAPGINKLIEDGEEIEIDMNKATIKSQNGEIISFKKLPPFMLEILEQGGLIEYLKNKR

SEQ ID NO: 11769 - protein, 414 aa, Methanobrevibacter gottschalkii
MPTMSEKILAKASGKEKVEAGDIVIANIDVAMTHDLTGPLSVESFEKIGAENVWDASKIVIPFDHQVPADSIDSANNHIIMREFVKKYNIENFYDVNAGVCHQILPEKGHVVPGEVIVGADSHTCTHGALGAFSTGIGSTDMAMVFAEGNLWLKVPETNRFNITGDLKENVYAKDVILHIIGEMGADGSTYKACEFAGETISNMSISDRMVLCNMAIEMGGKTGLVEPDKKTIDYVEKHSNKPYEIFKTDLDSSSLNMIDIDVSNLEPQIACPHNVDNVKPISEVDQEIDQVFLGSCTNGRLSDLRDAAKILKGKKVAKDTRMLVIPASQEIYLKALDEGLLKIFVEAGALVSAPCCGPCLGGHTGIIGPDEVSLSTSNRNFRGRQGSPDGKVFLSSAAVAAASAIEGKIVSPE

SEQ ID NO: 11770 - protein, 402 aa, Methanobrevibacter gottschalkii
MSNSIFKRFKKKETPIIEEKLPILEDRIFWVSTLQKIAFPVLNNLARDSLSKNMPVESISAEGHSSAYFDAFVRIFNGIASWLELGADNSEEGKIREKYIYLTLKAISNAINPKSNDYIFVVEPKQSLVDVALFAEGLLRAKNQIWLNLPIKVQARIIRDLKSTRIIAPYENHWLLYTSMIEAALLEFTGECDKERLVYGVRKFRDELYIGDAMYSDGEDFELGYYNSLFIHPMLNDILGVMRKYGLEDGEFLDVQLMRSSRLASQLERVISPEGTYPLLGKFLSYRCGVFHLMSQASLLKILPKNIHPAQVRSALTKVLKTQFESYNNFNSNGWLIIGLEGSQTDISDETTNTGTLYSCCSIFLPLGLDRNDMFWKAPSAEWSSLKAWNGHPIQRDQPINF

SEQ ID NO: 11771 - protein, 412 aa, Methanobrevibacter gottschalkii
MKVCIIGQGYIGLPTAALFSKNHCKVVGVDISEKIINNLNKGIVHIEEPGIGDLIKNAVEKKSYSASLTPQKADAFIITVPTPYIAENYSCDLSYVIDACHSILPYLEKGNIVIIESTVAPMSTDEQIKPIFEEAGFSIGKDLYLAHCPERVLPGKIMYELVNNNRIIGGVTEECAKKASEVYGEFVEGELILTEAKTAELSKCMENTFRDVNIALANELTKICAEIGVNALDVIEMANKHPRVNLHSPGPGVGGHCLAIDPYFIYAKAPETAKIIKLARDTNNSMPDFVCDNIRKIIKKGKIAVLGVSYKGNTDDDRESPAYEIIDKLSNDYEIQIHDPHVENPNYVNFDIAVKDSDLILVLCDHNEFKDLDYNLIKKSMKNPVIFDTKNIIKEVPSEIKLYNYGNLYELN

SEQ ID NO: 11772 - protein, 279 aa, Methanobrevibacter gottschalkii
MKILITGSNGMLGYDLQEVLRRTHELILTTSETLDITDKKHTMEFISNKKPDIVINSAAYTDVDGCEENQDIAYTVNSEGVKNLAIACKEIDCPLVHISTDYVFNGKSDKPWIEEDNVDPISVYGKSKLRGEKYILEILDKFFIVRTAWLYGINGRNFPKTILELAKNHSEITVVYDEIGTPTYTQDLAKAISELIKTDFYGIYHLTNSGSCSWCEFARYIFEVANVDVKVIPVTASEFARSASRPNYSVLKNKNWIKNGFNPLRNYKEAIKEYIELII

SEQ ID NO: 11773 - protein, 149 aa, Methanobrevibacter gottschalkii
MNKKLILIIASIVALFSIASVSAGFFDFLHWDDDSDNINVVEDGQYCTVNQVSAYIKEFHKLPSNYITKKEAQSLGWHGGPLKKYAPGKSIGGDTFTNRQHILPDSDYKYIECDINANGTFRGAERIVYNTGNYKVYYTDDHYNTFTEV

SEQ ID NO: 11774 - protein, 76 aa, Methanobrevibacter gottschalkii
MLIDGKLIKTEGHDYLIKILNLPDYYGKNLDALYDCLCEMDCEIQLINPKYVNKDIIDTFLDASIENEFLKFEILY

SEQ ID NO: 11775 - protein, 288 aa, Methanobrevibacter gottschalkii
MKGIVLAGGSGTRLYPITKAVSKQLLPLYDKPMIYYPISVLMLAGIKEILIISTPRDLPMYKDLLGSGASFGIKLSYAIQENPNGLAEAFIIGEDFIGNDNVALILGDNIFHGHRFTEILERATKLDEGAIIFGYYTNNPEAFGVVEFDDNWNVLSVEEKPKNPKSNYIVPGLYFYDNDVIEIAKNVKPSDRGEVEITSVNGEYLKRGKLKVELLGRGMAWLDTGTHEGLLEAANFIETIQKRQGLYIACLEEIAYLKGYINKKQLLKTAEELKKTDYGQYLFNLAKM

SEQ ID NO: 11776 - protein, 186 aa, Methanobrevibacter gottschalkii
MGKFNFIETGIEEMFVVEPAIFEDNRGYFMETYNEKDFKDAGHDLTFVQDNQSKSRKGVLRGLHLQVKYPQGKLVRVINGEVFDVGVDLRANSPTYGKWFGTILSDKNKKQLFIPPKFAHGFLVLSDEAEFVYKCTEFYHGEDESGIKWDDEDIAIDWPLNDIDEIILSDKDKKWLGFKESQIKYK

SEQ ID NO: 11777 - protein, 335 aa, Methanobrevibacter gottschalkii
MSKILVTGGAGFIGSNFVRYMVNKYSEYEIVNLDALTYCGNLENLKDIEKNDNYSFVKGDIRDKNIVDDLVQQCDYVINFAAESHVDRSITDPEIFIKSNVLGTQVLLNAAKKYGVDKYIQISTDEVYGTLGKTGYFKENTPLQPNSPYSASKAGGDLITRAYSETFDLPINITRCSNNYGPYQFPEKLIPLMISNALEDKKLPVYGDGKNIRDWLHVYDHCRAIDLVLHEGKLGEVYNIGGNNEKQNLEIVKLILNQLNKDESLIKFVKDRLGHDRRYAIDSNKIQEELGWSPKYTFEIGIKETIQWYLDNQEWTSKVKSGQYKDYYNKMYSGR

SEQ ID NO: 11778 - protein, 105 aa, Methanobrevibacter gottschalkii
MIIVYGKYSIYLLGGMEMLEQYLPFVGLIIFGNIENLVLSSQGVVAGVNPVKLGIVSILFVMGWLFIGTVGTSMLMQYVDFIDFIGGLAIFILGLQAMVESIRGV

SEQ ID NO: 11779 - protein, 92 aa, Methanobrevibacter gottschalkii
MKELKPFLALLVFGNIENLILAAQGVAAHVDPIILSILSLIAVVCWLLIGTFGTKLAMKYSRYINFIGGFAIFILGIQAMIESLPGMLTFFH

SEQ ID NO: 11780 - protein, 359 aa, Methanobrevibacter gottschalkii
MRYFKHRIYGALFKLFKDTIIKKNRVSFIVDSKESFKGNLDYIQKEFENRGNFEFHYFYKNKLSIGSFRKLSSSKFIFLNDNFFPLAFMEFHPETTIVQLWHAPGASKKFGGSVDIQNREILEKISKNTDYLITTSVNIKDYYSEAFQMPLNKIKSLGIPRIDYYFENHDVNTLKSNFLNKYNISSNKKILLYAPTFRDEEKYNNVFNYLNLEEFNENLGDEYILALRLHPKIENFYKNDISDNGNYIDVSDYESEQELMLISDILITDYSSIMIEFATLNKPIIFFTYDLDSYLSNERGFYYDFKKTVPGPIVHTSQELIDVIKKNEFDKSKISEFLNTQFDLIDGDSSKRIVDFLLK

SEQ ID NO: 11781 - protein, 319 aa, Methanobrevibacter gottschalkii
MDNINVSVIVPVYNNCEYIESTLSSIINQNFDNFEIIVIDDGSTDNSLEIVKEKLSASDISYLIIHQENAGVSCARNRGIEVACGDYLVFVDADDYISQNHLSELYNGETDFSLIQLVKREGNDLSIPYHFSESSISCNDFIKMELNMEIPFNFCQLMYKTDIVKKNNIKFTPNIIYGEDTEFALKALSFGDRISISNEVTYYYIQHEQSAIRTSEFKRFEIVGIFENLAQYYKNQGKTDLANLIITSRIPKAIFGNMNYFFYNNYDFDDVIAKMHQLNLFTKLSKFEGDFKFKFKIRLFLLNPKIYYKIWRKVKNSID

SEQ ID NO: 11782 - protein, 319 aa, Methanobrevibacter gottschalkii
MKVSVVTPNYNGEKFLKTFLKSLNEDSQYIGEVIIVDNGSDDGSLDYLKNNSFSFPLVLIENKENIGFSPAVNQGIKISQNNLIFSINNDTEIKKGSIKSLVDLINSSDDIFSVQAKMLQYNNKNLIDDVGDEYNLLGWTKKIGENHHSNEYNKVKRIFSSCAGAAMYNKSILDEIGLFDDNFFAYMEDVDLAIRSHINGYRNLSCPDAIVYHIGSATSGSRYNEFKVKLAARNNVWVIYKNLPVPLKIVNFIFIFLGFLIKYLFFYKKGFGSTYLSGIREGLSAKSKISKVKFESKNTKNYFKLEFRLIINTIKFLKR

SEQ ID NO: 11783 - protein, 285 aa, Methanobrevibacter gottschalkii
MDLSIVILNYQTFELTKNTINSIFEYEYSFDYEILVVDNASGDDSLVRLKEYFGDKVNFIASKENNGFAAGNNQALKIANGKYILLLNSDTIVWEDTLENIYNYMEKHNDVGVSGCRVLLENGELDKACKRSFPNVKNSFFRLFHIPTSSKDNDYNLDNLPDDGIYEIDCLTGAFMFMRADALKDAGLLDETFFMYGEDIDFCFRVKKTGWKITYYGKSKITHLKGASSKKQKSKLIYEFYRAMYIYYKKHHADDSLFLLNWIVYFGIAILCVLKLFLNLFKKKD

SEQ ID NO: 11784 - protein, 467 aa, Methanobrevibacter gottschalkii
MIKENQKLLNFSLVLIDVIVIGLALLCSLWLRFKTTLFGPIGGHLGFFNYLLFFTFAVIPVYLILYFAFGLYKPRRTYKNIFSEATQLIKVNILAFITLVSILFIINQPDFSRIMLILLAIIASFFGIIERFTIRTILRKMRINNRNIKHILIVGDNELAFSFARKIRENPYLGFVVSGFLGRSEHIGREIDGCSVIGSFEDIDKILDKNRFDRVVLAIPLKYYYKINDLVESCERVGIKAEIIPDYIRYFPAQPSVDMIEDIPIINIRYVPLDDDFNKFLKYLSDYIISIIAIIITSPIMVVTAIAIKLSSNGPIIFKQERIGYNSKPFMMYKFRSMKVQDPSEEKAEWTTKDDPRKTKVGQFIRKTSIDELPQFFNVLKGDMSVVGPRPERPYFVDQFKETVPKYMVKHQVKPGLTGWAQIHGCRGDTSIKKRIEYDIEYVENWHMGLDLAIMIKTALKKNPNAY

SEQ ID NO: 11785 - protein, 874 aa, Methanobrevibacter gottschalkii
MQEKILKLYEKIKDQLSEDEFQAEMAEIRENNADVTFFDDLDIAHMVLQNHGIENTIAQKEEDTNQLSFESSDGTGFTMTEEILEKYNKVKDKISEEEFLAKMKVHAEKNEHASFMNDVTFADMVVGEFITEEVESVSQSPEFSDKAISDLEENSKDVTVSGRVISISNPRSFKTRKGQSGEVCNVELKDNSGSLRAVFWTQNIKLLKNVNEGDIIQIKGVDIKEGYSGLEANLRPRSILVHLEEDTSKFPEYKEDITDIADIKPDTKVNIIARIIRIPTIRTYEKNGKEGKVASIELQDYSGKITYTLWNKNVELINDLGLEDGDSVKIIQAQARERINRDGGSELSLTHWDGRIIKGEFDVPEVKQEFTPIGDVFEAQDVSIKGIVSRLQDIKTFLRKSDGSEGRLRNFDVRDITGEIRVTLWGDDTTLPINKGDIIKIIGGNVRYDEYTQSQYSMNTNFNTQITINPENLSTEELDELNTLREELRPTPIGEIYTIDDDGIEIDVRGRILSVDDVNEFQRDDGSVGIVRSIIFADESGKVRLSLWNERAEEEYIVGDAYQIENARTRLGMYSVDLNIGSGARLIKLSEEQASSMFIPELSTLEKALYDYKKIEEIDEDDQDIIIIGRVIELNDIRNFERDNGDTGSVRNIELADETGSMRVVLWDDDAKREFEIGQPIKLQNPRFDLDRDNRIEAIVNRSTAILEPSESEIEKLPTQDELMEAIYVPKPIEALTEDDVNVCVTGTISDIESDRVIRKKCPSCGNNIEESEDEYICDNCGHVFDEPRYLLMVPLRIEDDTGSIKVTFFDKLAEELIGMNKEEIINIIEDGYGIEDKLEDLNGQTIEIIANVSFDEYSEENRLNPKKILSKYI

SEQ ID NO: 11786 - protein, 311 aa, Methanobrevibacter gottschalkii
MVELSDLPGVGEKTAEKLRDAGFADMMRLATATAKELSVKAEIGEGVAEKVIEAARRSENIDFETALEVDERRKDVGHITVGSQEFNDLIGGGIETQSITEVFGEFGSGKSQISHELAVTVQLPEELGGLDGECVFVDTENTFRPERIRQIAEGFELDVEEVLGRIHVARAFNSSHQILMVDKINDLIQSGKNVKLVIVDSLMAHFRAEYVGRESLAVRQQKLNQHLHSLQQIANTYNVAVFITNQVQAKPDSFFGSPTKAIGGHVLGHASTYRIWLKKGLAGKRIARLVDSPHLPEGECVFKITSEGIVS

SEQ ID NO: 11787 - protein, 301 aa, Methanobrevibacter gottschalkii
MDAIAITIFSIIIMIGLGYFLKRIDFLSKKDMDPFNKIVMYILMPCMIFHAIYNADLSSLPKLSLLPFVILASSIVTGVISYFILKRLNLDDKQVWSVLVTVMIANTAFMGYPVTLGIYGQTGFLRAIFCDIATLSMFLLLSFVLILRFGGTVKTAIRKIAIFPPLWAVILGLIFNLLNIPIGDVCEYTVNYLGQGAIPLIMITLGLSIDFSALARSKSMIIFTSIMKLAFFPLVAFLLATKLGLVDLQYNVSIIEAAMPSGMMSLLLAITYKLDYELTSDCILINTVISLITLPVIISLL

SEQ ID NO: 11788 - protein, 663 aa, Methanobrevibacter gottschalkii
MAEEKRDNNEELRIGVYVCHCGVNVGGVVDCPNVAEYAKTLPNVVHSTDYKYMCSDPGQAMIQEDIKEKNLNRVVVAACSPRLHEPTFRRCVEEAGLNKFLFEFANLREQDSWVHMNEPEAATEKAKDLVRMAVAKARLLEPLEATKVAVDNKALVIGGGVCGIQTALDLGDMGFKTYMVERNPTIGGRMGQLDKTFPTLDCSMCILAPKMVDCAKHENIELISYAEVKEVDGYIGNFTVKVEKKARYVDEDLCTGCGACVEACPIEIPNYYDEGVGMVKAAYIPFPQAVPLCATIDKDYCIECMLCTQACGPDAIDHNQEATEIELEVGTIVAAIGYDPFDPSGIYQYGYGRYTNVITAMEIERMINASGPTGGHVIKPSDGIEPKRVAFIHCVGSRDETIGKPYCSRVCCMYSMKNAQLCIDHEPDTEVTCYYMDIRAFGKGYEEFYKTSQEKYGIEFIRGKPAQIFENDDLTLTIRAEDTLLGKVTEYTYDLVVLSVGLEHAEGSDELRQTLGVSKSADGFYMEAHPKLRPVDTLTDGVYIAGVAQGPKDIPDSVAQGSAAASRAAIPMAQGEVEIEPIIASNDEAICGACQVCVELCPYGAIAIATGVGGKEFAQINSALCKGCGTCVGACPSGAMNQQHFKTEQIMAQISAALEDIGK

SEQ ID NO: 11789 - protein, 412 aa, Methanobrevibacter gottschalkii
MIHSQKFNYYNENLSWIIGDTMNEIFRTFTSESVTQGHPDKIADIVSDAILDAYMAKDKNSHVACETCLTTDFCMVFGEITSAGHLSENEIEDIIRNTIIEIGYDNSDLKFDGHSCEILNKLHEQSADINQGVDRGDDETGAGDQGMMFGFATNETESLMPYPIDLARKLTNKLTELRETGEIPYLRPDGKAQVSVNYDKEGNVVSLDAVVLSTQHDESMSDNQEQLKEDIREKLFKAVIPEELMTENTKEHINPTGKFEIGGPHGDAGLTGRKIIVDTYGGYARHGGGAFSGKDCTKVDRSACYMARYIAKNIVASGLASKCEIQLSYAIGVAEPTSVMVDTFGTGANIGDLTFEKIVRENFKLTPDGIIETLGLRDITYKQTAKYGHFGIDGLPWEKTDKIDELRKYIKN

SEQ ID NO: 11790 - protein, 422 aa, Methanobrevibacter gottschalkii
MTNYHDEILNFEKIAKEHTEYMRNSVNLIASENVTSVEVTEALATDFAHRYAEGQAFERFYEGCQYVDLIEDRTKKLSCKVYDCDYANVQPVSGVTANLAAFFGFSNPGEKVMALEVPSGGHISHADVSAAGIRGLKTVFHPLDKDIMNIDIDAMNKKIIEEKPKIILFGGSLFLFPHPIKEAREAADEVGAKIMYDGAHVLGLIAGGQFQQPLKEGADLMMGSTHKTFPGPQGGIILSHEENAEIIDNAVFPGVVSNHHLHHLLGLGIATAEMLEFGEDYAKQIIKNAQALGQAMYERGFDVLCEEQGFTQSHQIAVNLTNIRSASDIARELADNNVILNKNLLPGDNRDNSDDPSGIRIGTQEITRRGLKEKEMDEVAEFIKRVAVDKENIADEVAEFMNQYTKLDYAFSDRDAYQYHRL

SEQ ID NO: 11791 - protein, 230 aa, Methanobrevibacter gottschalkii
MRIGFAFTGAGHLLKESVQVAEKLANDHEVTIFLSGAAEEVLKMYGLYERVKSLTGGKYRELATDSDQKFSYPITGRLSLGKYDLLIVSPATANTVSKIVYGIADTLVTNAVAQSGKGAVPVYMVPVDIHPGPIDTVLPSKMELSKCQSCDDCFASIACEQGAILPHEEIDLTKCIGCGLCRNTCPYDAISEGKIITIYMRDIDIENTCKLSSIDNIQIFENPHEILDKI

SEQ ID NO: 11792 - protein, 105 aa, Methanobrevibacter gottschalkii
MIYNNEQINIKITYANNFYKRFKGLMLKKDFDDGLLFTNLKDSSIHTFFMRFEIDVYFLNEKKYIFEKTSLKPWKFYKPKKQAKYILETRKNKLKLKIGDRLDFI

SEQ ID NO: 11793 - protein, 220 aa, Methanobrevibacter gottschalkii
MIIEYLSDFNCPYSYIGLNRIMSVCNHLNLDVIWEMKSFELEPELNNIPTCSIDRYAIRNRLSIKDAENEIEEIEKIAQDEGLNINYKNMQLSSSKDAHRLVKYVERNYPTLTQEIVLKIFESNFIKNENISDYNVLIKIAISCKLNEKEIYEFLKKETYSIEVDLDMDEAISNGINTIPYYFINYNDERLIIPGVFEKEDFKTALEDLVNGEMKNKTFI

SEQ ID NO: 11794 - protein, 36 aa, Methanobrevibacter gottschalkii
MGFYRKYNTIIRTIDNFVKLYKVAKKDSEKSKDDKK

SEQ ID NO: 11795 - protein, 1078 aa, Methanobrevibacter gottschalkii
MPIHEAEKSYEHDKIEKKVQKFWKEEDTFKKVNELREKGPKYSFLDGPPYCSGKIHLGTAWNKVIKDSYLRFKSMNGFGLRRQAGWDMHGLPIENKVEHLMGIQSKQEIEEDIGIAAFVDKCREFAIENKIAMEQEFDQLGVWMDWDNPYMTLDPKYMESSWWTLKRANEQDLLVNDQRVISWCPHCGTALAAAEIEYEEKADPSIYIKFPVRGEENTYFLVWTTTPWTLPANMAICANPEFDYVYVSKDGETYILAENLIEEVLGKQVKIHRTEISDDSEDGENQIIEEKEIMYEIIKTVKGEDLIGMSYDYILADEVPIHDKFDEIDAVHTVLEGNHVELGEGTGLVHTAPGHGPDDFEVGQANNIPIFCPVGEDGCFTEEAGKYNAKFTKDENSQIIKDLEDKGLMYKSETIEHRYGVCWRCKTPIIYRATKQWFLKVTDIKQKMLDEIGRVEWVPKWAGEGRFYDWVDNARDWTISRQRYWGIPIPIWECPDCGELKVIGSLNELKEESLNDINVSDAELIHRPYVDEVEVKCDKCGKVIKRIPDVLDVWIDSGVAGWASLYYPEEKEKFEEWYPYDFITEGHDQTRGWFYSQLGTGVISMGKSPYKKVLMHGFVLDEHGNKMSKSLGNVVSPEEVIEKYGADVLRFYLLWASKPWDDLKFVWDELLNINKMFNILWNVYVFSTTYMSLDNFNPIGLTEKDMILRAEDKWIISKANTLVKEVTEDLDKLFFHKATRKINNFILEDLSRWYVRLIRGRTWVESDDPDKLGAYYSLYTALVKLISVLCPIAPHVSEEIYENLVKGVNPDALESIHMNDWGYDDDAIDTELESKMDVVRNVIDASIRARDIAQYKLRWPVSDITVVSQDENILKAIEELTDIIKDQSNTKDVLCASEFEKLSFNAKPNLKTLGPRLKGDMGKVMKALKESDGNQIKEDIEANGSITVEGHELSNGDVLFDSELPDDFVSSEFEGGNVFVNTNVTLEIKQEAMARELIRRIQDMRKDLDLDVEANINVDVETSDEFKELIVPQSEVISHEVRAKSLIISTSEECSKYSKDYTKEWDIEGEKVIISIKN

SEQ ID NO: 11796 - protein, 712 aa, Methanobrevibacter gottschalkii
MTLADSEIEYIEGILGRKMNELEEGMLDVMFSEHCSYKSSRPFLRAFPTEGKNIILGPGDDAGLVSITDKYALAVGMESHNHPSAIEPYGGAGTGIGGILRDIISMGAMPIALLDSLRFGPLEDDKSRYLFEHVVKGISDYGNRVGIPTVAGEIEFDESFRTNPLVNVMCVGLVEKDKIVRAQAPNIGDVFLLMGGTTGRDGIHGVTFASEELTSDSETEDRPAVQVADPFTKKRVLEASLEILEKINVSGVKDLGGGGLTCCISELVDSSSNGALVDLRSIPLRETGMTPYEIMLSESQERMVFVIGPNDVELACQICDKHEISSSIVGEVIEGNNMIISDEGNEIANLPTILLADPPSINRPIVEISADTEKIDVKEPSILKSLPALLSSSNIASKEWVYKQYDHEVQVRTVVKPGDDAAVLRIDENTAIALTTDSNTIHTKLSPFDGAAGCVAEAIRNVISMGATPYAVVDCLNFGNPETPEILWQFKTAIEGMSLVAEKFDAPVISGNVSFYNETEGVKINPTPAVGVIGVEDIENIRTLDFKNEGDKIILIGKTYDELSGSEYHRTVHNIEKGTAPKIRIEEEVANGKTVLDLIGKDKDKNITAVHDVSAGGLAVALSEMVIKSGLGCEVTLRDDELDKIQLLYSESHARYLLTVKADAVDDILSKIDVEANVIGEVKGTSLFINGHEFKFEDLDDAYHGVIEQYMA

SEQ ID NO: 11797 - protein, 405 aa, Methanobrevibacter gottschalkii
MFLSKLDSLANAIKLVKDNQKFTEVEEVPISEAHKRVLAEDIMAFHDSPPFDKSSMDGYAVIAENTFGASQSAPKKFKIIDAIGAGDFSSKIVNSNEAIIIATGAPIPDGANAVLMKEYTTSDEDDLTIYSQVTPGENISPKSEDIEKGQKVLCKNTFIRYQEMGLIASAGYDTVKVFKKPRVKIIITGNELVEPTKEEIDKAKIINSNQFTTKAMVEDSGAIAEITHAGDTFGEVREAILEASLEFDVIITTGGTAISKGDVVLDALADLGEILFHGVAVRPGKPVGAGIVNGKMIFTLSGQPVASMSQFDMVVRKYLFEMQGRPFEFHLQKRVSELKVPSQLGRTDFIRAVADDECAKHVLNRGSGIIRSMVEANSYIIIDENDEGYQKDDIVDVVFFDSLLW

SEQ ID NO: 11798 - protein, 376 aa, Methanobrevibacter gottschalkii
MNGIYYYLIAFVIIWMLVTIFHDKLSNHGFELNFPIIMWKTQKLKGLISKISNFSPTFWKWYMNVGIVVAFGAMILVTGSIISSIPSIFETPSVSILIPGVDIPGSQIYVPFIYGLIGLATVVIIHEFSHGIQSVCEKIPIKSMGLLLFFILPGAFVEPDEKSLKNSKNASKLRIYAAGSVANITLAVVALMLISLISIGIPHYFAEDGISIDRIVSDSPSEGILKEGMILQAIDNHKINDSESYVNIVKSFKPGDNVTVQTNQGSYSVVLSKNPNNDSVGFFGIQAAKHYVLLNDSLGPIPWILFELFELFNWVFILNLGIGLFNLLPLKPLDGGHMLETLLSYKFKEQLVKKFVNALSGVMAIIIVFSIIAGFL

SEQ ID NO: 11799 - protein, 408 aa, Methanobrevibacter gottschalkii
MKANAQKIADGVYWIGVLDWDLRTYHGYTLDGTTYNAYIVFGEDEVAIIDNAYPGKTKEMMARIDDAFAQEGRDVKVDYIVQNHVEKDHSGVLVDLHKKFPEAPIYCTEIAVKGLLKHYPALEGAEFVTVGTGDSLDVGGRTLAFLDAFLLHWPDSMFTLLADETGILFPNDAFGQHLCFTKRFSDEIPENVLMDAAQKFYANLITPLSKLVLKKLNEVVELGLLDSIKMIAPSHGQIWTDPMQVIGAYQNWATGVCEDKITIIYDTMHYSTQQMAHEIAEGAISEGYDVEIFYLHEDERSEIVKSILTSKGVAIGDPTINDAPYPSIGDIMYYLKGLLFNRTGIERKAVTFGSMGGKGGSPAKLAEELGNCGFDVVDSQEIYFVPTADEENASFDLGVKLAKACKEL

SEQ ID NO: 11800 - protein, 258 aa, Methanobrevibacter gottschalkii
MSEQKPIQIFSDSTELRVNVVKSPVKLTILEMLRDRDMEFDEIVINTGKSKSTVSVHLKNLRENGIISYRMHPIDNRKKIFYLNSKYLGSVNFSEPKELEETQSDYLIRNIVEGDGQFSTLLFHTLKAMLIQEGINIDPILKSTGNQIGKSIFYKLYNEDLDIFMDNLSKFWEKKGLGRLTFEIGQIIKIIIYDCFECELLPKTGKPACFLDTGIMEGLFTEFFKLPVSVIETQCYTMGDGKCVFEVEPQSIKLTNHL

SEQ ID NO: 11801 - protein, 234 aa, Methanobrevibacter gottschalkii
MVKKGKLIGIGVGPGDTELLTLKAAKVLEKVPVIFSPKSAKEKESIALSIVRPILKERKDYKKIMIVEPIFPMIEDKKELEKIWDSASELVAQYLNTGRDVAFITLGDTSIFSTYSYLQKRLMDRYEIETIPGITSFTACAAAKNEALVEQNDILTIVPKIDSRIENILEYTDSIVLMKASRNSTKLELKIKNDKREKEIYSVQNCTRENEKIIEGFSHEKPYLTTSIIKFKDD

SEQ ID NO: 11802 - protein, 600 aa, Methanobrevibacter gottschalkii
MLKSNCTCGKYPKKESKGPTNLFSFTKSKSRSSSILDDEIPEVYYVDDHKQDEGTAAYLKELYPNIDDDIIENFPFDEPRIGQLEIIQDINDAIKKGYKYIILEAGTGTGKSAIATTLAKMYESAYILTMTKQLQSQYSDEFEFPLVKGRGNFACLHDNLESTCDIGACKTSPTSSKFFCPYGVAKNPTLDAELAFEDSFGGTVFYQSSGHCHYWNQKANAINSPITLMNYDYAIVELNYVKHFGTRSLLILDEAHNIESKLMSTMEVTLYNRVLEKDINKQISPQTLKDGELEDWIMEIDAIREAYEDIDLKDVSKNKSERIRSTIGRLKTLRNNLEKEPKNWVIDTDESGVTFKPLRVHHYAKNNLLKYGDVVIFMSATILSHKMFSKWLGLNPNEVYHIKVDSPFTKEKRPIVLNLAGKMSANRIKKTAPKTIPILQEILKKHEGDKGLIHTHSYKCQQYIINNLYNSRLISHTSKNREQILDFFEKDENPLVLVSPSMSEGVDLPYDKCRFQVIYKMPFPYLGDKQVNMRMKRDKKWYAYKTVMTLMQAYGRGMRAEDDSCYTYIIDSDINMLFKSPMYRSLIPNFFKEAVVRVKK

SEQ ID NO: 11803 - protein, 320 aa, Methanobrevibacter gottschalkii
MKDSKEKEHRISNLKDLIDNVKEEDSNIDSQEDSELINYLHEDTVDFDELEINDEFIYHPDDDEDYVINLEESPIDEEFIINTPKEEELKNMSDDLEEPEDIISDVSENFDQFFNAKIGKTPVLAIVSSVLGIIFIAISIIIFESRSDRVIDNVVSGETNFISVIVLGLGILLLIYGIYKVFNIKSPLNGITESINSIDGKEKVKTNASKEKETEKIIPKSNIPLDKDSYKIGEFDIGDIKNKFKKSTTSKKPKPRPEDTNNIPPAKEKEENKKELTIEKIEDIEYKQAKLDNETIDDIFAEVEDIDEIPIISIDSEEKE

SEQ ID NO: 11804 - protein, 103 aa, Methanobrevibacter gottschalkii
MEFCPECGAMMFPNNNVLKCNSCGYIKEDSDNNDYKVSKKIEAEETVKMLGEDVDVGPRTEETCPECGHNIATYKLLQTRSADEAPTRIFTCVKCKHTWRAYD

SEQ ID NO: 11805 - protein, 140 aa, Methanobrevibacter gottschalkii
MNKYKKPSVTTDIFIFDEDFNFILIKRKNNPFKNYWALPGGFVDYGETVESAAIREAKEETSIDVELKDLVNVYSNPDRDSRGHTISITYTAKGDFNERKANDDAIDIGIFSAEKLDEINIAFDHNKIIKDCLNIVKNEK

SEQ ID NO: 11806 - protein, 93 aa, Methanobrevibacter gottschalkii
MENFEIIEDKTLELTFIVKDESHGVCNALRHILMQNPDVEYAVYNIDHPLTGKPEMTIKTKRGKRPRNALQKAAEQLQKESDEFKKLIDEALE

SEQ ID NO: 11807 - protein, 189 aa, Methanobrevibacter gottschalkii
MKIEEDEIVMPGDKLGIIEQYLPGEGTYDDDGDIKSSVLGNVKINQKMKVISVVSDAKPALLKVGDIIYGQITDIKPQRANVNIECIKDNARPLALPYMGAIHISQAKKDYLEKLSDAFRIGDIIQAKVVKITGDNVDLGSTDDDCGVLKAMCTRCRDYMHTTQKADELQCNTCNRKEKRKVSKNYIND

SEQ ID NO: 11808 - protein, 334 aa, Methanobrevibacter gottschalkii
MSMYNLDLDKVIRKITSMDAQTVGLQFPEGLKMQAIKIARQIEEETDATVVISGDPCFGACDVSDYKMKGSVDLIVHYGHTPLPLKYEVPTLFIEAYSNIDIKKDLEKSIEYLKDYYRIGLVTTTQHLHLLNETKDYLEDNGKEVVLGSSPSTRKGQVLGCNFSSIKNLDAEVILFIGTGNFHPLGIKLFSNTPVIALDPYNSEIRSMDEFADRILRIRFARITKARGAKKWGILVSTKEGQYRMTLAKEIKKILEDSKMEAYIILVDNVSPDVLLPYLELDAFVVSACPRIAIDDSQMYKKPLLTPQELEIVLNKRKWENYQLDEILFHEHYK

SEQ ID NO: 11809 - protein, 189 aa, Methanobrevibacter gottschalkii
MLEEVKKSLEASPIVKKGDYNYFVNPISDGVPAMDPKMLRELSLAVYKHADLDVDKIVAVEAMGIHLATALSLTTDIPFVVIRKRQYGLEGETEVYQKTGYGSSNLYVNDLHEGEKILLIDDVVSTGGTLIALLNTLKDLGLKIKSTVAVIEKGEGKNIVKKETGVDVISIIKLDVINGKVVIEKTIED

SEQ ID NO: 11810 - protein, 447 aa, Methanobrevibacter gottschalkii
MLGNLGENLTNTMKKLVGMSVIDKKTIKEVVKDIQRALIQSDVNIKLVLELSKKIESRSLEEKPPKGITPREHVITIIYEEMVNLLGSETVGLDINERPYKILFLGLQGSGKTTTIGKLCRFLQKKGFNPAVVCTDTWRPAAYVQLKQLTEEMDVPLYGDPENKDALDLARKGLQEFKNRKVIIFDTAGRHKQEEDLIAEMDELDDIINPNEAILVIDGTIGQQAGEQAKAFSQATDIGSIIITKLDGSAKGGGAMSAVAETGAPIKFIGTGERIDDFELFDPERFISRLLGMGDIKSLIEKAEENIDEDIAEKTMTNMLTGKFTLMDMKNQFEMMNKMGPMQQVLNMIPGMGNKISKEASKMTEDKIGLYKVMMSSMTEEEMLNPKIIKQSRVQRIARGSGVEESEVKELLKYYNNTKKTMKGIGKRGGRLGGGAMNRMMGQFMNR

SEQ ID NO: 11811 - protein, 402 aa, Methanobrevibacter gottschalkii
MYELAKQILEETGGRICKNCLGRKLSKTIEGTNNIERADKVCVELNISLDDVDCVICNNIFDKLNDKLYKKINDKINQLGLEFDTFLVGSKVPKDVQERDDCLSEKFNLPVETIKKEINRLIGLELWKIYDKEAEFESQDIVFNIDLIDNPKVRIQINPLYIEGKYNKFKRGIPQTKWPCTKCKGKGCCECNFTGKQYPESVEELISEHILKLTKGKEAKFHGAGREDIDVLMLGSGRPFVLEIKEPKIRKLNLAKVEDEINKINEGKTSYHNLHLCKRNRKAEIKQSSPDTYKVYNAIVECDERFDESKLEELLKLDEIHQQTPLRVLRRRADKVRIKHVKELSYEIIDDKHFSMRIKTEGGLYIKELISGDGGRSHPNVSEILGIKAICEQLDVIEVSEK

SEQ ID NO: 11812 - protein, 155 aa, Methanobrevibacter gottschalkii
MAEEFTHLTETGVHMVEVGGKPDQKRRAIASGSIFLDKNTINLIQNDEIKKGNVLTTAQIAGIQAVKNTSSIIPLCHPLALTGIELDFDVKKDEIIATCAVNTLGKTGVEMEAITGVSVALLTVWDMVKAVEKDENGQYPDTRISDINVIKKEKI

SEQ ID NO: 11813 - protein, 53 aa, Methanobrevibacter gottschalkii
MAKKDNKISMPQTGAGLVRYFDEESLGPKLSPEHIIVATVIVAILCFVLRYSA

SEQ ID NO: 11814 - protein, 274 aa, Methanobrevibacter gottschalkii
MLTKRIIPCLDCDLQVPEGRVVKGVEFKEIKYAGNPVDLATKYYEEGADEIVVLDITASHERRATMADVIDMLTENVFMPICVGGGIRKVEDYIKMLRAGADKCSTNTAAIKNPELLTEASKVVGSQAVVIGIDAKRRYISNPDDAPDKVVVETDKGFCWFDSSIYGGREFTGIDAIQWAQKCQDLGAGEILLTSMDGDGTQNGYDIELNKAINDAVDIPVIASGGVGKPKDILDVFKKTDVSAALAASIFHFNQYSIGDVKKYLKDNNVAVRL

SEQ ID NO: 11815 - protein, 304 aa, Methanobrevibacter gottschalkii
MIIESPIDLELTQISGQTSQPPWTKVDNSYREVVLVNNNPVIFDVEQSGEFFNFNYIGNISKKEAVSSLKYIFDLEFDLNKFYKYLNGHAELAEMSKFCHGLRLFLAPNPFECIISSICSANNSIKRWTKSISDIKEKWGINHNGFHTFPEISTFQEIFLDAEEELDLTDAGDISNCKNNLKSCGVGYRASYMRKASELFSLEMDISEISKMNYDEAFETILQVPGVGPKVADCILLYGFNFREAFPSDIWIKRIVSYLYFDGKDISVPKVREFGMDEFGDNAGYVQLYMFHYARKSGLMAKLK

SEQ ID NO: 11816 - protein, 116 aa, Methanobrevibacter gottschalkii
MKIRYATMIVNDMEESVKFYTETLDFTVDEVFDVPEGKITLLDGEGFAGIELIESSNFGSGLYSIGMDVEDIHKEIENLEAKGANIAMKPIKIQVGYMAKVIDPNGINIVLVQHNR

SEQ ID NO: 11817 - protein, 458 aa, Methanobrevibacter gottschalkii
MKLEKIVLIVATLTSFFTVFLSSAVMVAVPTLASEFGMSNIIQNWVTMLFFLAVAIFTIPSGQLSGKFGLKKSMIFGSSVYILSSIAAIFSINSEIFLICRLVQGIGVSFLNVASMAMVVSAFSPQERGKAIGINVTGVYLATSTSPVIGGFLNFHFGWRSIFLTSVPFLILILVLLITEIKEEWVTMGDVPIDWKGSIVYSLGILLFIYGFTRLDESTGIILTVIGLIVLGVFVALELREKYPVFDVKFFKNPKFSSANFAALTAYLATFAVTTIVNYHLQYIRGYDSQMAGIILLVAPLIQVIMAPISGRLSDKINPQKLAAIGMFFGAISLAMLSMLNVSTPLWFLIIAMVSHGLGFGIFSSPNTNAIMGSVPQKDTPVASASVATMRVIGQTMSMGMLTLVFAFVMGNVPMIEKYFPLLITSSQITCLICMVLCAASVFASLVGIKSKEMLEFN

SEQ ID NO: 11818 - protein, 143 aa, Methanobrevibacter gottschalkii
MKVATIETDKGNIELELFPNEAPGTVANFEKLIKEGFYDGLTFHRVIPNFVIQGGCPKGNGTGGPGYTIKCETEGNPHRHGTGALSMAHAGKDTGGSQFFITHSPQPHLDGVHTVFGQVIKGQDVVNAIRQGDKMNKLTVEER

SEQ ID NO: 11819 - protein, 386 aa, Methanobrevibacter gottschalkii
MNTQELIKIEDDYFINTFTRQPVVLDHGEGVRVTDIDGNEYLDMFAGIAVNSLGHNNPKLVKAIQDQAAKLIHISSIYYNEPALIYAKRLIDLTSFDRIFYANSGAEANEGAIKLAVKYTGKSEIISTVDSFHGRTIMTLAATGHEEYHEPFKSIMPQGFINVPYNDLEAIKNAITENTAAIIVEPIQGEGGVHVPDVEYLKGIEAICREKGIVFIVDEVQTGFGRCGTLFAHELFDVKPDIMTMAKGIGGGVPMGGILATEKIASAFVPGDHGTTFGGGPLVCAAANAILDEFADKNILDNVNEVGGYFISELKKLDKDIIADVRGKGLMIGLELTKPGAEYVDKLRKAGFLINCTAGNVLRFVPPLIITKTDIDEFVEALDEIL

SEQ ID NO: 11820 - protein, 427 aa, Methanobrevibacter gottschalkii
MDLNIKVNDKNHLDIGGADAIDIAEEFGTPTYVIDENRIRDNYNRFYSAFSKYYPDFKVFYACKANTNLAVMKILESEGCCIDAVSPGEVHISKMLGFSGDRILFTGNNITNDELKYVHDEGAVLNIDSVSALNRLSKMIDPEGVKISFRVNPMVGAGHHDHCITGGIMSKFGIMESEAVEVYKKAEKLGFNPVGMHSHIGSGILDPEPFKLAIESTMDIAGKVHQDAGIDFEFVDFGGGVGIPYTPEENVVDLDKFAEVNVGLFKEKLEQYGMGNPTMYLEPGRFLVGDACVLLVTVNSLKQSYRKFIGVDAGFHTLLRPAMYDSYHHIVDASRMNAENTQTVDIAGNVCESGDLFARDRLMPDVEEGDVLGILNAGAYGFTMSSNYNSRPLASEILVTDGECSVVRERETFEDLYAKQSIPPHLK

SEQ ID NO: 11821 - protein, 286 aa, Methanobrevibacter gottschalkii
MVDLKGLKFSKMHGIGNDFPIIDETKGKVISEEDKPEACRILCHRNFGVGGDGVLFVEPSDVADIGYRMFNPDGSEAEMCGNGIRCFGDFVYRKGILKKEKMTVETRAGIKTIEITLEDDEPVLFKVDMGLSTFKTPEIPMISEMDEFLDCELEVLDTTFNLTAVSVGNPHAIIFVDDLDEIDIDKYGPAIEAHEVFPEKINVHFVEVISKNEGKMRTWERGAGVTLACGTGATSTAISGYKLGLFDSNILLHLPGGDLKFNVYEKDDALGAFMKGPAELVYDGEF

SEQ ID NO: 11822 - protein, 194 aa, Methanobrevibacter gottschalkii
MPDFKINIDDNVYIPAEDSYLLADNLQIKKGQSVLEIGTGSGIVAMYASRLTDNITVTDINFDACELACKNFEANNIENIEILFGNLFDPVQNRKFDVILFNTPYLPTEKGEVLDDTINYAFDGGLDGRKVIDAFLNEVGNHLNDGGIVQMIQSSLSDNEETLKKLDKLGFISEIAKKEHFFFEDITLINAYKI

SEQ ID NO: 11823 - protein, 290 aa, Methanobrevibacter gottschalkii
MNSENSISLSKTTKSILNQNGIKLNKNLGQNYLIDKNKRDQIINFGNINENDVILEIGTGIGTLTIELAKKAKKVIAIEQDKNICDILAKRLKEEKIDNVELLNEDALNIEFPKFNKIISNLPYQISSPITFKFLEYDFDLAILMYQKEFADRMNGEVGTKNYSRLSAMLHFKCDVKKLTDVSSESFIPKPKIDSTVVKLTPKKNKISLEDFKIYSKFTKALFQHRNKKIRNALIDSRHIITNLDKKEMKKCMNEIEDEKLNNYLKKRVVVVTPEEILFLSKDLNSILNG

SEQ ID NO: 11824 - protein, 210 aa, Methanobrevibacter gottschalkii
MVDNKKRNGKKPTVKKEQYAVVLDYLSRGYVKSDMSKFGGKPIAQAIGTEQFTLLELAPKNGVDLEIGDTVFIGQGKKDKIYRVLGRLNFERLTATSRIELDYTIRDIVESNEEKYVNFFNTTGAVSTRLHTLELIPGIGKKYMWDIINAREEKPFESFKDITERLPTLTDPAGMIVNRVKQELDRNAIKRGKSKYYIFTQVPKKPRNPR

SEQ ID NO: 11825 - protein, 117 aa, Methanobrevibacter gottschalkii
MISMIGKEIIESEPISSAEVKKVLEDFSEDNELNYEQNITLNHLARFKRYSVEDSEEIIEKLQEEFGLRDKVAVRIVDLVPKDLADLRLIFAKEAIKIEKPDMEKILELLEQYNIEE

SEQ ID NO: 11826 - protein, 96 aa, Methanobrevibacter gottschalkii
MQRSRGLKSRSRKKMTKTQRPGRTNPITNRMQRFEDGDLVHITINPSIQKGQPAPRFHGKTGKVTGQKGKAYIVSLKEGNKAKELIVRPDHLKLQK

SEQ ID NO: 11827 - protein, 772 aa, Methanobrevibacter gottschalkii
MERTSELGKNLHESTKINVEKNNGIKERFSYEKLLKSLVMVETPFFESDKIVATVVSQLYDGIKTKEIKKIVHECLEDIDSEIANKYLASTRLKVRTSRDTIEAFDLSKIANTLIEETGASQETAFEIATETWKELKKLNVEYLTAPMIREIVNTKLVEYGLEDLRSRYTRLGIPVYNITNLIENGNRDNANMIHNPESIHKHVADEALKQYALLKMLPAHLADAHMSGDIHIHDLEFFAGRPLNCMQHDIRTFIKYGLKVDGTGDHTSIAGAPNHMETLMNHTGEIMLAAQQNMSGGQGMSLWNVFVAPFARGRTYEEIKQSVQMLVYNLNMAYAARGSQVPFTSMALEFGVPDFLKEETAYGPKGQVVGTYADFEEETRLIQRAFTETLLEGDNEGKPHLFPNTIYTLRKETMTSEYEEDIRLVHELSAKYGSSYFVNMFPKYRGNMANYMGCRTCLQDTWTGDWDQDCLRTGNLAYVTLNLPRIGYQSKDESQVFEYLDEYMDLAVETLMLRREQGLKCLNDFHILPFLKQQVAEDSYYRIQNSTLSFGFVGLNEMLSSLFGAGIENADANKFGVKCIEYINDRANQLKDETGLRWSVIQTPAESTAYRFATLDKKQYGDQAIVQGEGNANYYTNSSHVPVDTGLSLIEKIKIEEQYHSITPGGHIFHAFMGESYSDPDSLMSLTNKIAKKSDIGFWAYSSALSFCLKCKTLMKGLNNVCPTCGEKEDVEWYDRITGYVQQVGRAKSASGGWNPGKRQELIDRRRFEDN

SEQ ID NO: 11828 - protein, 1098 aa, Methanobrevibacter gottschalkii
MDYFDRLEADTHHLYDIANKARSRGLDVEIETEVPLAKDLAERVEGLVGPEGVAKRIKILEQNITREEVAFEIAAEIASGKFELTGEKANWDTEQRCDQGLRTALAILTEGVVAAPLEGISDVKIKDNFDGTKYIGVYFAGPIRSAGGTAAALAVLLGDKIRQAIGIDAFKPIDDEIERYVEEVELYESEVTNLQYSPTPEEVRFAANHIPVEVSGEQTDKVEVSHRDLERVETNNIRGGALLAMVEGVIQKSKKIKKISNKLGLDWNWLEEYSKPKKDDSKEDSGDSEIVSEPKYIQDIIGGRPVLGYPSEKGAFRLRYGRSRNTGLATMGVHPATMALLDFLAVGTQLKIEYPGKGNCVVPVDSIEGPTVKLKNGDVLILDSVKKAREVKKDVVEILFLGDMLVAFGEFLRNNQTLYPSGWCEEWWIQLLMRSDKFDAENTDLDLYKLEYEYLSATEAFNLSKEYNIPLHPKYTYCYNDVTIEDLNSLIDLIENGKSTFNKDEGMKLDLSYQKRILEIIGVPHIVRNDKIIIDKDHSYSLLETLPKKLPENETTIEAVNEISPIEIKNKAPAYIGTRVGRPEKSKERLMKPAPHGLIPIGNNGGSRRLVATAAKKGSVKVDISRRKCTNPECGISSFGSLCPKCGSPTEVGKPSQKTIPLATMLKKASDNVKVRRVDEVKGVVGMISESKLPEPIEKGILRAKHEVFTFKDGTIRHDSTDLPLTHFIPKEIGVTVEKLLKMGYEKDCYGNPIENENQIIELKVQDIVISDNCGEYLLRTAQYIDDELERYYDMDPFYNVKEKSDLIGHLVAGLAPHTSAGVLGRIVGFTKALACYAHPYFHSAKRRNCDSDEDAVMLLLDALINFSKSYLPNTRGGSMDAPLVLSSRIDPEEIDDESHNLDIFERFPVEFYEETYTPHKPAEVLKYIDNVEMHLGTPQQYEGLMFSHHTSSIHAGPTVCLYKRLPSMREKVEAQIALAETIRAVDQRGVVEKVLSSHFLPDIMGNSRAFSKQKVRCPKCGAKYRRMPLTGKCKCGGNLILSVSKGSVTKYLEISQELVNRYPVSHYLKQRLEIQEFGINSLFESDKSKQSSLDIFF

SEQ ID NO: 11829 - protein, 317 aa, Methanobrevibacter gottschalkii
MSNDKPINAMYGSKMKLDLDKLKNNRKKDDEGKVIETKHILEGSEEPVVEDAPEEVVEETVKKEAMEEAVKEKPSKNVDSSVVDSLKVKLGEREKKLSNQSSELNYLTNKLIPKLKKENANLKSLKIELTDALEKSTRKYFDQLDINADLSNKIGKIGAEGAVNKVRADKFEAEINSVKEELQDKINQYKEKLDSVNIDGLKKENNELSCELRDIKTELDKTKKENMKLSEEVKSLRDEIIEIGNYKQEVDNQNKKEIEEYKEEISSISTKLRLKESSYDKLFNESSKTISNLRKQVAKLEEDLEKESNRGLFNRFK

SEQ ID NO: 11830 - protein, 163 aa, Methanobrevibacter gottschalkii
MTNDNYFMDEAIVEAQISLNEGGLPIGAVLVKDNEIISRGHNRLIQNNSVVLHAEMDVLEKAGRLNYEDYIKCTLYTTLSPCPMCSGALILYNIPRVVIGENTTLMGAENLLESNDVEVVILNNLECRELFLKFVKDNPGVWEKELKKVGNNTTVKYGDYCNK

SEQ ID NO: 11831 - protein, 125 aa, Methanobrevibacter gottschalkii
MEIIVTNEMDERFIEICNSFECFSDEPQVVLLLNNFGKIVGCASFKVYDADSAEITTLFLNSHDNCEKIAYKLIRQLEKIAIDYEFKSIVVNFDSYEDILIEIFEKLDYKFIDELLMKKEFKSLI

SEQ ID NO: 11832 - protein, 527 aa, Methanobrevibacter gottschalkii
MTHWIENVAKELAERDVEEHVIASGTSISGSIHIGNSCDIFIANAIGKKLRKLGKKAKTIWIADDHDPLRKVPFPLPQDYDKYLGMPYSVIPCPDGCCANFVEHFEKPLLSVMDDYGIEMETKSGFEMYKNGVYNDYIRTSLEHTDEIKEIFNEYRREPLADDWLPYNPICDECGRVNTTYAYDFDGDIIKYRCECGHEGEMDIKSGNGKLTWRVEWAARWKIFKTTCEPFGKDHAASGGSYDVSSIISEKIFDYPAPYPVPYEWITLDGEAMSKSHGVFFAPEEWLKIGPAESLNYYLFRSKPMKSKDFSPKMPFLDFIDQFDTVEKVFYDEEEAPSEKEGKKFKEIYEIVQINEGSPLPFRPSFRFLVNAYQIAGNDLEKIYGILKRNSQLSKSFKDKEFGDLTEAELAQYRERVDNVIYWLDTYAPKFVKFQVQEKNIPKLPLTDEQTKFLTDLADLMENNEFAEATQLHDAMYEILESQELKPQKGFQAIYKMILGQKQGPRAASFLLSLDKDFVVKRLRQEA

SEQ ID NO: 11833 - protein, 445 aa, Methanobrevibacter gottschalkii
MTVLKLIGLWCDKMTQISDARKGILTEEMKHVAKIENVSEDFILKSVAEGTIVIPGNVNRDVEAAGIGAGLRTKVNATVGTSTDIVNFDEEVQKAKIAIDHGADCLMELSIGGDLDEIRRRVLDMSPLPVGSVPVYQASIESIREHGSVVDMTEDDLFNAIEKQAKDGIDFMAIHSSINIETLTRLKRQGRVTGLVSRGGSFMSGWIVENEKENPLYSNFDYVLEIAKEHDVVLSLANGMRAGSIADSTDRAQIQELIILGELIDRSREAGVQCMIEGPGHIPINEIPTNVMIQKKMCSNAPFYMLGPIVCDVAPGYDHIVSAIGAASSAKAGADFICYVTPAEHLALPNPDDVREGVIATKIGAYAGDLATGQIDGSQDLAMAEARKNLDWEAQYSCAMFPEAARAKRDQRPPEEEDTCTMCGNYCAVKIVNEWLDKSDSDLIK

SEQ ID NO: 11834 - protein, 304 aa, Methanobrevibacter gottschalkii
MAKNRDLLAIGHSAHDYIIRVPEFPKANFSAPITNMKTFNGGAAANVACVGAKLGLKTSLVSAVGGDFKKTEYYEHMQNLDIDTDSLIIVPGESTPTAFVLTDDNEDQISYFYWGAAREFAESKVPASAIKNTEAVHLATGDPNFNWRCSEEAKNEELLVSFDPGQDLGMYDIKKLRDVIENTTILFGNHHEIGRILESLEVDLDGLRTLGPKIIVKTCGAKGSEIYSNEDKIKIDAIETEVVDPTGAGDSYRAGFLSRFLNGESLEASAKFASTVSSFIVEHQGCQTNMPTFDDSFERMNRFY

SEQ ID NO: 11835 - protein, 288 aa, Methanobrevibacter gottschalkii
MEFESKGLISLEIEGEVYGYKLYESLDSLTKTKSQRKSAKELNISHTVFNRRILRAEKKLGFKLTEKLGNGTELTKEGLDLLEEFKKYAIQIEKTPTINIVGGHISTGLLESIELPFKTNIYSSNDEDAFELAKRGVVDILTLDDPLIAFERDINFYPIAYDYLVLISSPDSEKIESISDLENLDFVSVSGSAQRLAWNSLKHYDIHVNIKENVSSQFDAYKKVRNSKNLHTFLNASYFKGNELLKFNTQHVISLIKVNEDKAKVDEFIKYLTNEAQESIEKQGFTPM

SEQ ID NO: 11836 - protein, 196 aa, Methanobrevibacter gottschalkii
MEIMKTSIKAILDNIKNAEDFLDEKAIDEFENIIIGSKNIFVTGAGRSGLAAKAFAMRLMHLGLSAYVVGETISPAIYEDDCIIAISGSGETNTIVSAVKIAKNRGSKVLALTSYPESSLGQLADAYILVKGRTKKEVDDENYMKRQIHGNYTSLTPLGTAFELTTLVFLDAIVSELMEKMQQTESDLKARHTVLE

SEQ ID NO: 11837 - protein, 249 aa, Methanobrevibacter gottschalkii
MKIEKVNAIKYKNNQHEEVKENVVKDETITLTINGEISRSLSAIEDSLKEFAVGYLFNENMVKSLEDIKKIEIDGVQINAEIDDTLLKTNETVLCSDSAGGWRSKIKEVNPVESDLQVNVKELLDRIEELKNNAEIWQATGGTHVAGIVHNGQFVVKEDVSRHVAVDKVIGYGLLNGFNLNQSYVIYSGRMPADMVIKMSRAGVPILASNAAPANSGYNIAKKGNITLVGFLRGQRCNIYNNQNRVIFD

SEQ ID NO: 11838 - protein, 189 aa, Methanobrevibacter gottschalkii
MNIDDYDEQLQRAVEFHGELCGGIAIGTKLGMYGLELLGMELNQRHKNLIVILESERCTSDGIQSVTKCSIGKKSLKLVYYGKFAATFYNMDTGEAYRVSDADANKKNKSNETKDELVERFRITPPEELFNVERVHVKPFKGAQKPGGNHKTRWCSVCGEKVTDDYHKLRAGKPICESCANGSYYEIIE

SEQ ID NO: 11839 - protein, 267 aa, Methanobrevibacter gottschalkii
MSSFKSPVDTAKAISKTAGAKNSANIVNVILLSFLAGAYIAFGGLLAIVSSAGMIKAGAPLGLEKFVFGAVFPVGLIIVVLAGSELFTGNVMFMVMGVLDGSASIGGLAKNWVLSWVFNFVGALFVAYVIAFMGGLCPTDASVPAYAITAKAIAVAEGKVTMPFTVALIKAIGCNWLVCLAVWLANVSDDAIGKIVGIWFPIMAFVTLGFEHSVANMCFIPLGMFLGAKGVTWTTIIVNNLIPVTIGNIIGGGLFVACIYWYTFLKE

SEQ ID NO: 11840 - protein, 721 aa, Methanobrevibacter gottschalkii
MVEIKYVPTICPYCGTGCGLNFVVKDGKIVGVEPLKRSPVNEGKVCPKGNFGYQFINREDRLTTPLIKENGEFREASWDEALDLVANKLKEVSDEDPNKVGFYACARSPNENIYITQKLARVACGTQNVDHCARICHGPTVAGLANTFGSGAMTNGFDSIKEADYIFCIGSNNMEAHPLFGRKMIQAKENGAKLVVLDPRFTPTAKIADEYVQFETGTDVALMNAMIKVIIDKDLQDDEFIANRTKGYEEMKETVQKYTLDKVSEITGIKPETIEHLAVEYASADKAAIVYSLGITEHSHGADNVMSTANLAMLTGNIGRQGTGVNPLRGQNNVQGACDMGALPSDYVGYRKVKDPETTAWFNDYYSGDGYEVNLPTTPGLTLVEMMNAAHAGDLKVLYIHGEDPVLSDADVKHTKEALENLEMLVVQECFLTDTAQCADVVLPAAGWGEQEGTFTSGERRVQCLHKAQEPPEGAWLDWKIMEEIAVRMGVPRSLFHYETSEDIFNEIRECAPIMAGMNRERLDTPEALHWPCPSEDDPCQPLMHKEKFAHPDGLGVFQALEHKGPVETTDEEYPLVLTTTRVLFHYHAAMTRRCETLNNEVKTGFIEINTKDAEERGIINGEVVRAYSRRGEIAIPARVTDDIREGIVNIPMHFVECAANVLTNSDSFDPKSKMVELKACAINVEKLPEKVVMRGEVYKDGTDTEIKAENMATTTIKVGK

SEQ ID NO: 11841 - protein, 401 aa, Methanobrevibacter gottschalkii
MSAKINDMYYAYSAIEDIKEKGEYGGVVTTIMKYLLEEGIVDGVVGVTEGHDMYDGVPILVTDPADVIKTAGSVHCGTLNIAKFVSKYLDGARDMKLAVACKPCDAMTIRELMKKGKIIEDNVIMIGVNCGGTFSPVPTMNMIRDVYELDPKDVIKEEISKGKLIMETADGEKGIAIGELEEQGLGRRENCQRCNLKIPSNADMALGNWGVIGDLAGKATFIEVFTEKGADALGKVIDAGLIATEEPLEKGIKIRENINNFMLKESLEKKDVDYAGTTGDIIDVFHMYEDEFSKCMKCYGCREACPLCYCDDCCLETEGPEWVPGGYTPAAPFFHLTRLVHMVDACTNCGQCSEVCPCEIPVAKVWSIVNNKVRDIYGYIPGMGSDDPLPFTDHVSKAKWI

SEQ ID NO: 11842 - protein, 311 aa, Methanobrevibacter gottschalkii
MLKNVVKDKYERPILSLRITITNRCNENCIYCHHDGMVSSKDEMTPDELYKISKIARKIGVKRMRLSGGDPLVRKDIVEIVEKIASLDFNDISLTTNGVLLEKYAKGLKDAGLDRVNVSLDTLNRDTYKYVTNMDYLNEAKSGILKAVEVGLYPVKINMVIMKDVNVHEIKDMFEFCKEHGIILQLIELIESENCEDDKFSAEHHYSLDSLEKKLTDMADKVHERKFMQGRKKYYIGEGEIEIVRPVDNAKFCASCSRLRITPDGKIKPCLLRNDNLVELISHIRNGKSEEELEELFINGINNREPFNKED

SEQ ID NO: 11843 - protein, 345 aa, Methanobrevibacter gottschalkii
MKIVSIVGRKNTGKTSLTVKIIEELTKRGYNVASIKHSHHSMEMDKENTDTWKHKQAGSNVVVGIGSTTFFNARKEMDLNRLLFLIKHMDPVDFVVIEGFKKYNYPKIATSPDVVDEYTIKEINSFTIDDKGLKELVDIIEERSHDIVDTLFANNCGYNNGENIASEIREGNLTVDELDNVHSYLSIDNKVVGLNRFVSDFLKQNVLGVINTLNLDDYNIEKISNIELIIPNEVDKTPINAECTVLINGNNLKINNFAKNLVANSIKGMINSIKTEDNAKMIDIAISNIKNNELKKATINLKVNNHNVEINRFTQKILKETIFAIVNSLRINEEIAELRIKVEER

SEQ ID NO: 11844 - protein, 149 aa, Methanobrevibacter gottschalkii
MPKHIASGLKYLAAVKLKMAGKSHQEIADELGVDRSTISHYLNGRNLSWNSIDVARTIIDLCPKDFLTMTEAIFNNPEQSRKIVNICRERNFEAKVEDSCIGCGLCVNACTMKAIKLESLKAHADSMQCCGCQLCEDECPTNSIKILEI

SEQ ID NO: 11845 - protein, 365 aa, Methanobrevibacter gottschalkii
MIRNLKEVKDNNFDITRSADEVRNLSFNDHVCLGCGICESTCPVEAITLNAVAIDARNRLSNDIYFSGHEKIAQNFREDFDVQRISIDESKCVLCGMCSGLCPVDALVLTIDDVPIREIEAYPHYNAFSEIDDDECIYCKRCEIACPRDAIVIERVLPDRADLVTGEINVDDDECIYCGICEELCPAEAIVVDHETGKESIVIDKDKCVYCLVCKKSCPTNAINAICRLCNYGEYDLDSSKSVVKGNSIIDPDLCVYCGWCEGVCPTDAAKVKKPFKGSIEVDDEKCQACGACVDICQCNALAFPVSTGPGSRMAHVVANDDYCVRCKACAKACPNGAITVKRTEVDHTPINSATWKEALDAIKD

SEQ ID NO: 11846 - protein, 76 aa, Methanobrevibacter gottschalkii
MELKVNQDNCLGCGICVIACPVNAAISPENAGGNGAKTEEVIMMVENGFIKLFSPEKCELCGTCQMFCPVNAIWLE

SEQ ID NO: 11847 - protein, 189 aa, Methanobrevibacter gottschalkii
MYYANTYLEKPVVPDVKITGEGNTEVLKCMLNTGSDIYQGACKKRGSTLKQEYKNVSGTCYMDPRDMAKLGVNNWDTVLVKTDFGEVVVNCAVSRDAPHEGTVFICKGPWANTIVSHDTYCCSDPTYKGIKCTVEKTDRKVLLMADLMRWVYKKYVDEEDDDVVENMESLGELPVYHGRKWEELIDHDL

SEQ ID NO: 11848 - protein, 458 aa, Methanobrevibacter gottschalkii
MTYEPPVTDYDHIVENCTCAFCGCNCDDLDYLVKDNHVVAVRHACRLGASKIMEDMDQRLLVPMIRDENGELTEVDWDTALDKAAEYIANSIRPVFYGWSETSTECMKEGVALGEYIGAVLDNQATICHGPSLQAVQNAGYPIQTLGEVQNRADMIVYSGSNAMNSHPRHLARYAAFCRGYFRQRGRFDRTVVTMDPKFSDTAKCSDKWIGFEQNGDYGFYNAIRAVLRGKELYQDVISGIPKEDIYELAEEMKQAEFGVLFFGLGLTHTLSKQRNIDIAIKMVQDLNKYSKWGLTPMRGHFNVNGFNIFMAFECGFAFGVDYCRGYPRYMLGETNTIDLLVRKEPDCFMVIAADPGAHFPNGANQHLADIPVIQIDIHWGPSTELADVVLPGSFIAVECDGTSYRMDGVPIYMKKAIDKPETCRDDEWIVRELKERVMKLREEPNVAPKYVPNPNAL

SEQ ID NO: 11849 - protein, 571 aa, Methanobrevibacter gottschalkii
MEYILKNGIVYDPANEINGEKKDVMFKDGIIVDDVSSDAKVLDVTDKIVMPAGIDPHAHIAGPKLVVGRLYRPEDSRRGVTQKTKVLRSESGFSIPSCPATGYRYSRLGYGTVVEAAMPPLEAKHTHEEIATIPQLDIPALPLFGNNWFVMEYAKDNNIEDIAAFVAAWLKISKGYGIKIVNPCGSEAWGWGMNVHGVNDKAPYFDVTSKEVVVALAKANEMLNLPHSIHIHPNDLGHPGNVPTTLETMDAVKNIKKGSKAAEIRDQVMHLCHLQFHAYTGNSWKDAASGAEELTKYINKHDHVTCDVGQITFDETTTMTADAPMEYDLFKLSGLKWTNKDIECETAAGIIPCIYSPKNPVNTLQWAIGLELFLQIEDPWKVCLTTDHPNAGPFTRYPRIISWLMSNQRRMEMIENREVHKWAEKRTTLATLDREYDFYDIATITRSAPAKIYGFTDRGALTPGYRADIAVYDINPNEIDPSRQAADIEKGFNIADYTIKDGQILVKDKEIVKVKESQNMWVNVKGWEQNEQKVIDNIMPFFTQYYSVKWENYPVHDHYVSNPIRIDVDGK

SEQ ID NO: 11850 - protein, 288 aa, Methanobrevibacter gottschalkii
MKTITFDQIKTSSIALEFDEVIPDEIFSWTEADFAKYQVPIGNSRFPITDFFDITVEGDAAGPDEVKMILNGDLNRVKYIGCKMSGGDIVCNSSVDLHVGAEMSGGSILVKGNAAAHAGREMSGGYLEIEGNTKEFTGASYIGEWRGMTGGQIVVGGNAGKQCGECLTGGRIHVKGNCDILAGIHMTKGIIEIDGDVNRWPGGQMKNGNIIIHGFLGRLLEGFVLDGVVENPEIEGTTFEGKYIKYTGDIGLNGKGNLYLGAEANKEKLASYGEIDDEYTSIREYRNL

SEQ ID NO: 11851 - protein, 96 aa, Methanobrevibacter gottschalkii
MIEEIEMTFDEVLSYVKTKVDVGDVLEISYNRIFAPGEVLGFTEEDDMTGEGFRVGLQLNGEILNQSIEIDFNEIEDDLIEMRHITDEKELIIEIL

SEQ ID NO: 11852 - protein, 96 aa, Methanobrevibacter gottschalkii
MKELKLTTKEAVNYLKENVDIHDRIEISYNRIFAEGEILNMDFSEYFGKPGFKMLISLDESHLGATVEIDVYEVEDDIIEFNHYPKDGEEVDVTVI

SEQ ID NO: 11853 - protein, 560 aa, Methanobrevibacter gottschalkii
MSESEHRMIEILRILSEQEKPTGSKLIADELKNKGFNLGERAVRYHMQILDEKGFTERIGNSGRKITKLGLEKLEKGLIYDQVDFIYSKFEEMIYLTDFNYMTQEGKVVVNTSTIYNEESVDIIKNIIQSDLSVSPYVNLNRIGNNGEMEVTTLCGTTIDGVLLNEGIPSQPKYGGLLKIEDSEPVKFTELISYKKTSVPPLEAFSAKGCTSIMDVVENGEGIIPANFRLIPGIGREKAINIINKLDKIGIGGVIAISEEEKDILGLSVPEGMVGISIVGGITPFCAVQEQNQDIEIKIAEEIKDFKTLSPITSKIKPVLKDIKPTPQQKISFLLSKTWNLIQQVNFDIEKRKGDIISNVSFIDKDKIDKSLSVMEETYNDNPKYINPYYKLINHPTNDSKIGIATICSLSIDGILIDNGVMSNPKYGGLLELTEPPLFIDLISYNGSTEDPHKIFLAKNMTSITRNNGSNKILASFKEIPYISREHSVQLLEILNNIGFSIYKIGKPREVTYNAKADNYNFGIVTGSGLNTIGAIKEKGIDVEVKAIEKLLPFEKMDRL

SEQ ID NO: 11854 - protein, 452 aa, Methanobrevibacter gottschalkii
MSDIPEEKIERITEIMKEDNIKFIRLQFVDINGTVKNIVIPFNPEDDMSELFNEGMLFDGSSIAGFVGINDSDLVLKPDINTYSRLSWRPEESATCRFICDVWTPEKKPFAGDPRGVLKKSLSHIAKMGLKYNIGPEPEFFIVDIDENGYPMPYDNAGYFDVEPLDKGPDFRRELTLNLEDLDFEVEASHHEVAPGQNEIAFKFKDALKTADAVITFKQAIKAIVDNMATFDQLDYRVTFMPKPFFGVSGSGMHCHQSVFKGDKNLFSDPDSENGLSKDALYFMGGLLKHAPAVTAITNPIVNSYKRLVPGYEAPVYRAYGLRNRSALIRVPAARGKATRIEYRSPDPACNPYLAFTVMLEAGIDGIVNKIDPGEPVELDIYSMSEEERIERGIKVLPTSLWEAYHSLEEDPLILNALGSHVSEKFLELKYKEWDEYRVQVFGYEQKKYLDI

SEQ ID NO: 11855 - protein, 250 aa, Methanobrevibacter gottschalkii
MPTRYIGDGYWEIVSRQMSIVTRSEQQKFKDTKITVIGCGGIGGQTIEMLARMGVGEIILVDEDSFDMSNLNRQNFANLNGIGIAKSEVAKDKVRLINPYVKVTGFNEHVDETNIDKIIGDSDIVIDALDNVLTRVISSRKAIEKKIPFIHGAIHGTLGQVTTFLPNTKSYEEMFNLPSFGKDLTEEVTESLKNITSGTPPVIGPTPNLIGCLQAMEAYKIITGVGKVTVAPKILTFDLLDLGSFLLEEI

SEQ ID NO: 11856 - protein, 388 aa, Methanobrevibacter gottschalkii
MLYNTLGKTGLKVSRLGFGTMRLPTINSNADIDKQEASEMLSYGIENGINIIDTAYPYHSAGIDGNGNSEKFLGEFLKENNLRDEILLQTKSPSWLIEKKTDFEYYLDIQLEKLQTDYIDLYLLHSLTVPDWNKVHDLEVLDFLDDCLSSGKIKHVGFSSHIEIDYLIEILDEYPKWEVALTQMNYLDEYYQSGVMGLNYLKEINMGSMVMEPLRGGRLVQNIPNEVQELWSTAEKKRTPVEWALQYLWNRNDVDCVFSGMNSLNQVKENVRIASIEDKISENDQELIREVARTYRTFLGNSCTRCGYCMPCPHGVDIINCLTEYNIAHMMQNPKASAMQYFTLIDDDSRADSCINCGECIPFCTQMLNIPEELQKVYEYFGSEFNHF

SEQ ID NO: 11857 - protein, 416 aa, Methanobrevibacter gottschalkii
MSKVKDISLAPEGIRKIEWVQKHMPVLEHIKQEYLETQPFKGITIGSCLHLEPKTINLGLTLMAGGAEVAMTGCNPLSTHDDAVAGAADLGLNVYGWREQDDEEYYQTINMVLDHKPDIIIDDGADMIMVLHNERTELLSRIKGACEETTTGVHRLQAMHADGALKFPVIAVNDAYTKYLFDNRYGTGQSSFDAIMGTTNMVIAGKTVTICGYGWCGRGLALRADGLGADVIVTEVDPIRALEARMDGYRVMTIREAVKQSDLIITVTGNSDIISGDDFKYMKDGCMLANSGHFNVEINRPDLEAISTEVKEVRESIEEFTTKDGRKIYLLADGRLVNLSAARGQGHPAEIMDMSFAVQALSAKHILENDLSVGVTKAPDEIDYSVATMKLKAMGIKIDSLTDKQKDYMSNWQEGT

SEQ ID NO: 11858 - protein, 216 aa, Methanobrevibacter gottschalkii
MSFFKYIDNGEGPTKLFIGGLHGNEGTTSLKFIKRIKDENLSSGQFYFYNFDKTPYISTVDKEYYKSELGQKVLGLIEYLCPDFYTELHCYNLKNYDKLTSMERYKKTGIPPLIKLGNHVLVSSVSPLIRMTYFSTETVCKTLEFPCFEKLNSEIIEKYNFNKSLAIETYEELLNLILSSPSRDHFEREMLKKHENQVHIAMRYAEKVFGKDFPPY

SEQ ID NO: 11859 - protein, 111 aa, Methanobrevibacter gottschalkii
MNFLNNCIIVFHVTHRFVKDVQIKGILDMDYYGEIENPLQYFDEDKNLIWHIPPNPYRGGTKEYVAYKKLIEEFKPDDGFIELLAVCGEYPEYYHYDWYDIEMEALTWESI

SEQ ID NO: 11860 - protein, 327 aa, Methanobrevibacter gottschalkii
MGVKLKDIIEPESISFKDLEGRTVSIDAFNTLFQFLSTIRQRDGRPLTDENGNITSHLSGILYRNSSMVEKDIKPIYIFDGKAPELKSETQAKRREVREEAEKIYKDALSRGDAEKARKFAMRSSKLSPEIISSSKKLLTLMGIPYVDAKGEGEAQAAYLVQNGDAYAVASQDYDCLLFGAKRVVRNLAVNSNLGNLEFYQLDKVLRELDITREELIDMGILIGTDFCDGLKGVGAKTALKLAHKGQLKEKIAELQKESAHDLDEVREIFLNHNVNTDYKIKWEKPQKDKIIEFLCYEHGFSEDRVLKASDKLKNLNSSQGSLDAWF

SEQ ID NO: 11861 - protein, 187 aa, Methanobrevibacter gottschalkii
MSEPKNEANRGLIDKITQVEQEYGKNFSNTQKILLTTDGSITAILDVLYGKITLSTLDQHFEDADEYHAKLVNVNKGDEINYREVIMHRNGKPLIYAISHIPLSRCTKEVCADLIRADIPIGRILKNYNIESRREINNIYIEKPNETLKELFGTDEDMLARDYVIINHDKILMWIKEVFPISYFTEI

SEQ ID NO: 11862 - protein, 417 aa, Methanobrevibacter gottschalkii
MNITEKILSAKAGHEVTSGEIIEIPVDLAMSHDGTSPPAIKTFEKVAKNVWDPEKIAIIFDHNIPANTIGSAEFQKVCRDFIKTQNITKNFIHGEGICHQVVPEMGLVEPGMVIVGADSHTCTYGAFGAFSTGMGATDLAMVWATGKTWFMVPEAIRMKVEGELNPYIAPKDIILNIIGETGIAGATYRTAEFCGETIEKMGVEGRATMCNMAIEMGAKNGIMEPNREVINYICQRTGKNESELNIIKSDEDAVYSKEMHFDIEGMEPQIACPNDVDNVKGISKIEGTVINQCLIGSCTNGRLSDLKDAAEILEGKKINDDIRLIILPASREIYKQAMHLGYIDTFIDAGAIICNPGCGPCLGGHMGVLSEGESCISTTNRNFKGRMGDPKSSVYLSNSKVVAASAIKGVITNPKDL

SEQ ID NO: 11863 - protein, 392 aa, Methanobrevibacter gottschalkii
MIILQYFISHYNKEYELNFPEDLLIYDTTLRDGEQTPGVCFSFDEKLEIARKLDQFKIHQIEAGFPIVSEKEKETVKAIANEGLDATILGLTRTKTEDIDAALDCDVGGIITFVGTSDIHLDHKMHITRQDAINLCETAIDYAKDHGLYVAFSAEDATRTDIEFLKRIYSKAEECGADRVHIADTTGAITPQGIDYLVRELVKDLDINIALHCHNDFGLAVINSITGILAGAKGISTTVNGIGERAGNASLEELIMALKILYGKDYGFKTKYIKELSNIVSEASGLPIPYNKPVVGNNIFRHESGIHVDAVIEEPLCYEPYVPELVGQKRQLVLGKHSGCRAVKAKLTECELDVSDDELIQIVREVKKSREEGKYINDKVFKEIVKKISKKE

SEQ ID NO: 11864 - protein, 183 aa, Methanobrevibacter gottschalkii
MIEVEVKAKITSFSEMEKKLENIGATKSKKEFQEDIYFNSPIVNFAESDEALRIRTTKENDNVDIFITYKGPKIDKKSKTRKEIEMKIEDAEKCSDIFEAIGFRKVRTVRKNRQYYTYENFEISLDDIEGLDPYMEIEIGLKDGEDYSKAQKSIFDLFEKLNITEGFDRTSYLELLENLNITN

SEQ ID NO: 11865 - protein, 181 aa, Methanobrevibacter gottschalkii
MTDVEIKIENIVASASIGKDIVLTEVSQALEGVNFNREQFPGLVFKLKDPKTAALIFSSGKLVCTGAKSIDDSKLAIKKTVDLMRTIDTEIPHEFEIKIQNIVASANLESTLNLEAVALELENTEYEPEQFPGLVYRLSDPKVVLLLFGSGKVVCTGAKTKSDAKLGVERAYDRLSELDLI

SEQ ID NO: 11866 - protein, 513 aa, Methanobrevibacter gottschalkii
MIKLVVFDLDNVIIDGEAIDEIGKIANVEEDIAAITEKAMQGEIDFETSIKDRVQLLEGISIEDIEKVADELPLIPGALETIKSLKDNNLDVAIISGSFDVVAEKIKDKLGVDKVYTNSFTVEDGKLTGEVTGPLVSGSKLDVLNGLVEEAGITLDEVVAVGDGANDISMIESAGCGIAFNAKDSVKEIADVVIDEKDLCKVSEKILNQLTTDNAGNETVEKKAEEKNTLPKSDFVLADTMEGVRKQKDEKEAEIAKVAEERENFNRMAKEQRKIRDELNASLKENLNKAIEFRNERNEINKAVESAKKARNEANNKIKSLEWSSGKRDKIKIENEIKKIDKIIETRVLDIKKENQLVKNANDLRKQLMKIHEDESVQGESQELKKLSEEEHEKVITLSEKAQAAHEEMLTYFRKTDDIRTAADEAHKNFIEARKNASAKHEEFKNILSDIHVINKKLGSHRPKKRRNDNKPSSGSNRNREEKERAEEIFAKFKNGGKVSTEEILLLQKYNIG

SEQ ID NO: 11867 - protein, 48 aa, Methanobrevibacter gottschalkii
MTEEKIETCFICGKKFDMNKAELGYYRNGKYPICDFCADFYRFYNEEL

SEQ ID NO: 11868 - protein, 718 aa, Methanobrevibacter gottschalkii
MHEVIVCEKPTSAEKIAKALSPSAKKKVYNKKVKYWELKKGSKDITVVSAVGHLYSLTPDNPKDKVYFDLHWAPAYEVNKRGSGFTKDYVRAIKKLGRNADSYIHACDYDTEGTLIGYNALKYACGQENLDKVSRMKFSTLTKKDLLEAYDNRIELDMNQVDTGIARHVLDYYFGVNISKALMKSVSNAKHRFLKLSAGRVQTPTLSILVEREKEIKDFVPEPYWLIKAVVEGNIEVNHIDGKIFDRDRAEEIMTKCQGKDAIVDRISFSNSTTKPPVPFNLGGLQSEAYNVFGFSPKKTQTIAQNLYTSGYTSYPRTSSQKLPESLDFKSIFTQLGYDGEFKKHIDQLPSKLKPNNGKKDDAAHPAIHPTGILPQGLSKDDKKIYELIVYRFISVFFEAAKFETMSATLDIEGEKFRFKRRRVTHKGWMEHYPFRKIDDEIFPDIKEDDLMKVLELISDEKETKPPARYNQASLIKELEKRELGTKATRADIIDKLYDRKYITGTQQIEVNQLGENMIDTLSIYCNNLTSEELTRDLQIKLDGISNNKSTRREIIDEGEKDVKVILEDITKNSNEIGSKLYESYQESNIIGTCPTCGGNLVKRYSPKTKSSFVGCANYPDCTTSYSIPKGTNFLKKTCEKCGLPIISFGKPRQRACLDSNCGKDKTKIHKPTEVGKCPNCGKPLLKRSGRYGEFIGCKGFPKCKFTCSVDELESKLK

SEQ ID NO: 11869 - protein, 892 aa, Methanobrevibacter gottschalkii
MNKETKMTIVKSVFIILILLAVVFALKMPAADLPLITDEAKGEYVDSSGLPYFSEMDSYYNLRLTEDYIDHGYVGDQIINGSEWDMHRYAPTGNQINYELGIVYVTSFLHDIFGGDHSVREIAFWTGAIISTLAVIPAYIFSRRLTNEYGAIVATLIIALAPNYFAHTFPGFFDTDMFYYIFSLFFIFFFVESIRAKKIAYKLLFAILSIISIGLFSQSWTGYIFYIGLMGIFSIVYLIACYYFNIGEDSQDEYSSKLHWFINQNALKSILILGIIGFIGLAIFKGLDGVTGLFGSLLSLLSLQSASRVVGGFPNVLVSVAEMQIPSMLGSGMNSLFLANTNGAVNGIGGIGVLFAGLTVAYLFVRNIFRIKGNSVKTESNVKPQKSERLSSSKRLDNKRKLKIDLSRYNLEFVSDILSDKKLTLLYGTLFIVWLVVTALAVTRGSRFITTIVLPFALLTGIFVSIAMEYIRNKITDDRILLAITAIAAIFVAVPVSTVNSIFAILVFVAIVGIGAVSIYVLKPKATSGRKLPIKKHIAIIAIVLALVTPCICGAFLTSESVVPGTSDSMWNAMTWVNETQSDDTVLTSWWDFGYLFEIAADKQVTFDGGSQSGDRAFWLGQAMTTDNLELSAGIFRMLDTTGDKAVESLVNITEDTGKSVDILIDILPMKSDDAQKTLQSKYHLTAAQANEVVQYSHPKNPRPVIFVASSDMLQKAGWWSYFGAWNFTNQSSENYNYYVPTEQVKVNPGSTGKLALLDDQGMTVNAVIQRGSGNNSTTAYTEAVYTDSGKQIMVNDTPYNPLNISNLMVIEDGYVMKNQSVGNVKDANYTLLLIGEKNQYTPILMSNELANSMFTRLYLYGGAGQNIFENVHTENGVMLFKVNFNNTAAGA

SEQ ID NO: 11870 - protein, 364 aa, Methanobrevibacter gottschalkii
MGIEEKIKDIEDEIQKTPYNKATSHHIGKLKAKLSKLKEESLQRSSGGHKGQGFHVKKTGDATVVLVGFPSVGKSTLLNEITNAESKVGAYQFTTLDIVPGVMEHKNAKIQVFDIPGIITGASSGKGRGKEILSVARTADLILIVLDTLNPQHLDVILNELRNIGIRPNEKEPDVTVKRKKLGGIHISSTCPLTHLDEKIIRSIINEYGMHNADILFRDDVTMDQFIDVLDRNKSYVPMKILLNKVDLVDDSYLEELKKYIPDFIPISADKKTNIDELKDIIFDNLNLVRVYLKPQGRKADMNDPLVIKKGTTVIGACRKLHREFVKNFRHAKVWGTSVKFPGQKVGPDHVLDDEDVLRIILKK

SEQ ID NO: 11871 - protein, 181 aa, Methanobrevibacter gottschalkii
MSEAIFITGTPCTGKTTVSEVLSSKLNCKLIKINDLAIENDFVLGIDEEKGYRIIDIEALDEKVSEIISESDELIIFEGHLAHLCSGADKVIVLRVNPDILRPRLEARDYSESKIRENLEAEAMGVCTSEAFEEYGDKISEIDVSKLSIEETVNVISYVIEDKLDFPVGEVDFMDWLISNF

SEQ ID NO: 11872 - protein, 274 aa, Methanobrevibacter gottschalkii
MGETNVKILYLTDLYYEAKGRKYFEEDLYISGILKEHFDIALCHPKNSKDFENDVDLIVFRNTGPVTGFEEEYESFVKRVTSNDIRTFNEFVGKADMKGKQYLLDLTLDGYPVIPTIDDLENINLIPDCEEYVIKPKDGADSIGLEFLTKSELFEKNLVNMLIQPAIDFEYEVSFYFINDSLEYALYAPNKDKRWELEKYEFSQRDKEFAEKFIAWNDIENGIQRVDACRTKEGELLLVELEDLNPYLSILELDEKTKDDFMNHLIIALKNICD

SEQ ID NO: 11873 - protein, 128 aa, Methanobrevibacter gottschalkii
MNNDKKAEKCPMELAMELISRKWVIQILRDMFFGKKRFNEFKDGKPNLSNKVLSNCLKEMEENGLISRNNDEDKQIIEYTLTDKGKKLNKVVYELAMFTLTTDLGNEFYDDETKIELENIFKNTLINN

SEQ ID NO: 11874 - protein, 148 aa, Methanobrevibacter gottschalkii
MKFNAWNNNEKFFSSKIAQNVISTACGSDINTACGSDVAASACGSDINTACGSDVAASACGSDINTACGSDVAASACGSDINTAVAVMWLLLLVVLILTLLVAVMWLLLLVVLILTLHVDQISPQLVVQTDFKINSILNILFFYILFF

SEQ ID NO: 11875 - protein, 342 aa, Methanobrevibacter gottschalkii
MADFFAFQWHILDDCDQRCKHCYIFSEENDKELITMKYEDMEIVLDNCLKFCLKTNRTPYFSITGGDPILHPDFWQLLEMLHEKKIHYSILGNPFHITDEVAKRLKSLSCRQYQLSLDGLRDTHDYFRKPGSFDITLEKIRILQDAGVRASIMTTVSKTNIDEIPDLIDVVVENNACLFSFARYCPTSLEKAAQMTSEEYKNLLAKVWEKYNEYKDSKTFFTLKDHLWTLFLYEKGLYEIPENLNDDIVYDGCNCGNSHLTILPSGDVFACRRMDSKVGNALNESIYDIFMGDNMDEYRQFEKFEKCSRCELLRFCRGCPAVSYGTTHDMYSPDPQCWKVVL

SEQ ID NO: 11876 - protein, 321 aa, Methanobrevibacter gottschalkii
MKAVVLEKTCNADELKVSEVEIPKVKDGWVLVKILGFGINRAEVILRDYEADEDYIELPVIPGIECVGKVVDSSNTRFKNGDRIAALMGGMGRSFDGGYAEYALLPEKIVFKIDEDVFDKLTLEEIIAIPETYFTAYGSLMSLNLVKDDTLLIRGATSALGLSAMQLANSMGCEIFATSRSEERFGKLKSNGADECFADDGCLAEKLNCDKVLELIGPKTLEDSMKCINSGGICCVTGVLGGIEYMDEFDPIKIIPNGRYLTSFFSNYPTQEIMDNIFDFIIKNNIKPEISRVFYNLEDIGKAHTLMESNMAQGKIIFKLE

SEQ ID NO: 11877 - protein, 203 aa, Methanobrevibacter gottschalkii
MVTKEECFKQLRDVIDAVLSTVDDNGNPQSRIIDIMHIEDDKIYFLTGRGKHVYSEIINHPKVSYLSLKDNKSIRISGEAHKLDNQKYWIDLIFENNPFMNNVYPGNARYILEPFCIEDYEMEFFDLTQKPIFRQSFKFGDVEITVKGFEITGDCIACGTCQACCPQQIPVFVDDKFEIPPEHCLHCGLCYENCPNDAIVKRE

SEQ ID NO: 11878 - protein, 208 aa, Methanobrevibacter gottschalkii
MLKSENGIINQIGSRILTRKAILNNSINYIEKCVSSNNIFKRRGVIEAISVEFDAINDYSFLKQIISCFLNETDVEILSNLSKVMDKITRNNCSYFKDEILKYISKDLDNHYYLHLINSFYEISGGEEDEFILKAIKPFIDYFEKNSIDIRKIDASISTRISDIILKIYEENLGDNSIKNQCLDYIDIIVKDDLYYFENKLNEKFELL

SEQ ID NO: 11879 - protein, 193 aa, Methanobrevibacter gottschalkii
MDHKITDLQINALIGTNSKYEIFEIDRQYDIMSTSIKMDKSKKINFNNHMPHECTLLKNVIELNNKELYDKIKDYFCLYYISALENTIENSFRKFWSLSERIIKDIHGGMKDEKLVKYMGKLLKMCRYPDKIIQRVKFIKIKRNNLVHENIHGEITQSDQAIVKIIAENLILFLICYFNEVTDIGDYKSFYDL

SEQ ID NO: 11880 - protein, 214 aa, Methanobrevibacter gottschalkii
MNKIEYTTRKLNSLKQTLIKSFEAINSTSNDPKYYYETIWDLMNQKSNIKEMFVKATLSKQIYLINISSILRKIQNNDESDILDNFLVELNKMYLEYNAMDKEQINIIIYTNIPIKLKSNDNLIETLKYFNLKIFEFSSYNFENELDLDDEIKYKFNSSKFLMLKYAADARDYEFVKSEALNAIYSFFGYITYIHRLIMILKSGILMKLHWIIK

SEQ ID NO: 11881 - protein, 140 aa, Methanobrevibacter gottschalkii
MVDTFSKETRSYVMSRIKCKDTKPEIIVRSYLFSRGLRFRKNDERYPGSPDIVLPKYKTIVFVHGCFWHLHEGCKYARIPKSNVDYWEKKLYRNRERDKHNQKELEKMGWNVITVWECELKKDKVEQTLEDLYAQITSKL

SEQ ID NO: 11882 - protein, 57 aa, Methanobrevibacter gottschalkii
MSDIVKVRGRHGTKTLDITIPAKISKEYDIHAGDVFKVGIVKENDSIKIIYELVYKD

SEQ ID NO: 11883 - protein, 54 aa, Methanobrevibacter gottschalkii
MGQDGFENETLLMEALNNKRFNELNKNLKDVITFTSEKPINEKYADTRHCLKLS

SEQ ID NO: 11884 - protein, 101 aa, Methanobrevibacter gottschalkii
MPRHTPKSNICNKLSPVDCINKIKSVITEKRSIGHGNVYGISGDNQEITQINEAIKLDKGFQFVLNCESEAHLSQLEDLIKKELTSNEYICGDASRCRVFC

SEQ ID NO: 11885 - protein, 89 aa, Methanobrevibacter gottschalkii
MLPGAEFSVENVMGIHELIFKEVVTQKRDCGTAMVGSSIYHQGAESQCIEYVASANIRFDCNISNVNVLINEIVSDFADKGYGVSVEFI

SEQ ID NO: 11886 - protein, 83 aa, Methanobrevibacter gottschalkii
MVFNIDDIKKRVIPIVIKYGINTFSLFGSYARGDANENSDLDFVMDKCDLKGLQYVSLVQDLEKEFNCHVDVISKGSSNKKIS

SEQ ID NO: 11887 - protein, 58 aa, Methanobrevibacter gottschalkii
MNEKDNRWAETIIGYCNRIDDYLNRFDDDKEIYMSDSLYKDACALVIIPIVNLQIIFR

SEQ ID NO: 11888 - protein, 97 aa, Methanobrevibacter gottschalkii
MISSEEKEKIKEEIVEKINSVLEKNNESFRLDKINVLNKNETVKFMGNYRVYDRKKYDTVSREINSFLKKYGDVEIKSKKIRDSGMKFTTVSFNFEL

SEQ ID NO: 11889 - protein, 406 aa, Methanobrevibacter gottschalkii
MIKRELYLNQIRHLFGSDFIKVIVGLRRCGKTSLLKSIIGELQDKGVKKENIIYISFELVQYKNIFNAHQLDELILKLVEGLEGKIYLLFDEIQQVEFWEKSINSYQASFDCDIYITGSNSKLLSNELATLLSGRYVKINLYPFSFAEILQYKQEINGLKLNEMNLKELFNEYLLFGGMPGLLPIKDESTKINILHDIYDSIVINDVLSRYKINEIDLFMRFSYYLMNSTGQTFSKTSITNYLKNENKKTSRNTISNFTKYLEDSLFCKKVMRQDIIGKKLLKTEEKYYLADQGFHHALVDNNSDWLGRILENVVYNELIRRGYSVKIGKIKNKEIDFVCEKQDNKIYVQVAYLLSTPETIEREFSPLFDVPDKYRAYVLSMDEVNLSEGGIIHENIIDFLLDYEI

SEQ ID NO: 11890 - protein, 313 aa, Methanobrevibacter gottschalkii
MFKFDKEQHVFDFAGVKMGGQPGEYPTVLCGTIFYGGHNIINDELTGDFDHESAEKLLNDMISMSDITGNPCIAQVFGQTEEAIVKYLEFVGDLCDIPFLIDSTSADARVAGAQYADEVGLTERAIYNSINMSADKSEMDALKETNIDSSIILGFNPMNSTVQGKIAMWENGDDGAYEKGLLEVAEDCGITKFMMDTAVTPLGQGAGVAGRASFAEKAKWGYPVGSGIHNIPSAWDWLRDYKNETGNKTAFTVCDIGANILQVMSCGDFVLFGPIDNATICFPAIAQTDMFIAEAAKDLSTEPIETHPINNLL

SEQ ID NO: 11891 - protein, 121 aa, Methanobrevibacter gottschalkii
MDERSYNISEFAIEGEEAVKTVFYTTDSTSGSVWCVKPGQEVACHTHNNSDDIWICIQGEGVFYPELGDEIPIKKGQVAVTPKGLCHGATNTGNEDFIFVSIVAPVPADYNPLYSFLFFIN

SEQ ID NO: 11892 - protein, 121 aa, Methanobrevibacter gottschalkii
MSRGKRPKWMIEIAKERMEILFNRAEMEFINHPERSNRYVELALKLSTKYNTKIPEKWGRRYCRNCKSFLSPGRNCTVRLVNSEVNIFCGECDHVMKIPYHKEKKNKRRAKYESIKKRNDE

SEQ ID NO: 11893 - protein, 85 aa, Methanobrevibacter gottschalkii
MSQSKKEMMNRALSAMTINIGKNGINENVIDEIKRQLDSNEIVKLKFAKNIARDKDKFIDDIVSQTRAKLIDVRGHVAVIYKKKP

SEQ ID NO: 11894 - protein, 145 aa, Methanobrevibacter gottschalkii
MTTVFDVPADLLIKKVADEFKNNDKINSPAWSNFVKTGVHKERKPENVDWWYVRTASIIRRVYMDGPVGVMSLRTFYGGKKDRGVRPEVFRKGSGSIVRTSLHQLEDAGLVEKVEGGRVVTPAGRSFLDKLSAEIIKDVPGLEKY

SEQ ID NO: 11895 - protein, 118 aa, Methanobrevibacter gottschalkii
MSDLDEIRQKRMAELQAQQAAMQNQAQQQAMAQAQQQEAQAKFESQKKQIIAQIMTSEARNRLSNLKLTKPELVNQIELQLIQSAQSGSLRGKVTDEQLKVLLRQIAGQKREIKITRK

SEQ ID NO: 11896 - protein, 194 aa, Methanobrevibacter gottschalkii
MKAGVLYSGGKDSSFVAVMLKRLGLDVELCTANFGVYDSYIPASKSAEALGFKHNVLKMDYGILDDTCDMIMNDGFPNDGIKFIHARTVEKLADDFDIIADGTRRDDRTPKLNINQIKSLEDRKNVQYINLDSFGHKSVKLITSSLFEISHERSNKDNSSDFEVEIRTLIDEKGGNSLDIFPEHYQTRVIGYKK

SEQ ID NO: 11897 - protein, 51 aa, Methanobrevibacter gottschalkii
MSRNKPLAKKLRMAKANKQNRRIPIWAYAKTNRKLRYRPKPRHWRRNSLKL

SEQ ID NO: 11898 - protein, 81 aa, Methanobrevibacter gottschalkii
MERVYTIPLRNVKEIKRTIRAPRAIREVKNFLTKHMKAEEVKIDESINHAIWKRGIQKIPSKITVKAVKDDDGVVTATLAE

SEQ ID NO: 11899 - protein, 224 aa, Methanobrevibacter gottschalkii
MLKRVDIVGNPNIGVFILATDEYAIVPYNLLDEKADIIKETLDVDVVKSSISGCSLIGSLAVANSNGMVVSPHVLDREIKQFEDLGINVATVPGQYTALGNIIAANDKGALASPFLSEKAINIIEETLDVNVESTSMVGSDIIGSMIQVTNKGFLISSNAVKSEISFAQEVFGVEGDIGTVGKGISLVGACSIANSKGAIVAKDSTGPEMARVEEALGFLDDDF

SEQ ID NO: 11900 - protein, 74 aa, Methanobrevibacter gottschalkii
MITKIYRVKGTFVMGDEYHKFTKEFKATCEADIEEKIYERFGSKHRINRNQISISEIVEIAPEDVVDPIVKDIL

SEQ ID NO: 11901 - protein, 144 aa, Methanobrevibacter gottschalkii
MEDQQKLNSLLNEINVYRQQADLIQQQIELIRTSMAEVDALFSALDDIEGKESVEAFVPVGAGSFVKGELKSTDEIIVSIGAGLAVKKDADGAREILNGQKKDLTDSLDKMLANLQQCTDIVGSLQAQAEQIAAAAQGKMTQMG

SEQ ID NO: 11902 - protein, 2074 aa, Methanobrevibacter gottschalkii
MKKILIFLLILIFALSINITFASNTTNSSDIYISNEGSDFCGDGSIDNPYQTLNYTIGKVSNNSNIYLKSGTYNSTGYDIVNKSISINGIGDVTIDGLNGFISQSIFKINSNASLFLNNIKFKNGYCDLDNETPSCIINQGRLFITNSTFDNFKTSVGVITNENYLCISNVKTSNLSNSQLFSAPYKYNIPIQFIYNIWCCDIYNSSIGASYNNKNMTLTNSFIERFVSNKDYSNQTSYAYFNNSNVHLITANDCDMLIFNNTYINCYFDVDDTTHTIEYSNLIWDNVTLSKYNDLFYFSLKIGYSNLTAISSYFLTSILFLSSNATISYSCILSNIITAVVSNVNVNYNWWGDNKGPNVMNGEFSKITSNYWVVMMADYDDSLVKIDLSKYTNGLDVWNLNNPSKLRTRLVKLRTETGNLTKTSGYLENATFYSELNGNNINTMLYAMVDNQVLRIVVGEGNSDYDLYISDTEGNDYFCDGSLENPYKTLKKVVSKAISGNKIYILPGYYTLSWNANIKILKNLTFIGIGNATLSRSNARNIFIVQEKGVLNIENLTFTQATSGYHNYYDPIIHVIDGDVNLKNSNFYNITTYGVVFSDKSEHVTVNNLTLLNVEGPVVVGNSTKVSIYNSKFFNGSEASFYDSYYSFLIPVCSNLSVVNCTVDGYKGGLIKLNPRYEQIAARSYIYNSTFLRNYQYNYVYAPMVSTYSYNYMTGFSIIENCTFCNNIGNLVFSNIINNCTFVSNKRIRYEETNIHYNVNYPKALIYAKIIINSNFNNNSFISKNYEDMVIHGDEVYYSTFINNSAAFGGALSGSKEIHYSIFINNSAAFGGNDVFVYNGDLNCSSNWWGSNQKPDSSRVFVFIGTLVLDDWVILTMDYKNDRVIAYLDNLLDNNGNSYPLNHVLPSRAVIFSTEGGELTPSNTFLVNNKASTFLIRLTSSDFNVFAQVDNQITSLTVYNNTTQILMSNVVIYGKDVLYNLSLININGHKISNQDLNVIITHKNSIIDSFIVTTDKSGDASFSVDYAIGIYQVNVVYLGNGYFEECNSSATINVSSIKTKLQSYNQTYSGKNNKFYAILVDYHGRYLLNRDLILRIFDLNDNLVNTVDVKTGVGGRADVLLSLDVGNYKMKWDYLGNEWYEKSTCISFVTIRPIETNIILPNTTLYGKGNDYEFTFKDMYGNLISNEMITFKISKENESSKFSLITKKGIASININLLPGKYDLEAVYAGDKVYGSSFASAILYVEPIFVTMNHNSYQSLPKNGVFTVILKDMYGTKVSGENLSLELINKDIHKVYEAVSDASGQANFKLDAPEGVYFALINYGGNIWYGSSVSAVTIEINSNVPINPVYINGSNLVQYYGEDKYYLIKFNDTNAYSLEGKLVNVLINSEDWSNSYTLESNVFGEARIQIALEPGTYNITYNYKNEYYGLFAQNSSTIFVYKMPTSLIASNMILKKGDSKNLEVKLVNKNGDPIANLPVIIKIDDNEYNITTNQKGIAKLLLNLDLGTHNVTYSFNNKNYISSKGNVTILVVNDSKKTTTLVGNDVYTREDQTINYTVLLSDLLDNPISSSEIVLKIINSDDINIKTYKGYTDVNGVATFKFNLKFGNYFVNAYYNGNSVNLPSFTTNNLYIKVLENYTETILFGNDIEIHNGGDDYYSVVLSTVDGEFIKNQIIEFIIKNNSYFTNTDENGIAYLKIPFSPGSYEVLTKFHGCDNLTSSSIHNYISIYGDLFNFYSKDVVKAYNNGTHYYVALYDTNNEPLSNKTINFYVNNQTYQDVTNADGFVCFEVWLNPGKYIINATFKGEYPDEFTSVVNNITVLPTIMGENLDVYYNENTVFSLFLLDYNCKPLENTEVVITIGGAKYSTISTFGSASWKLKLNAGVYNVICKNPITTEKITRKINIKSTIISKNLVKYYKGSSKFSVTFKDRFGNFSRNSKVKFIINKKTYVKTTNSRGIVSLNINLKPGKYTIKTYNLKTGEIKTNKITIKTLIISKNKKVKAGKKINYNVKVFNSKGKIAKKATIKFKIKGITYKIKTNKKGIAKLNIVLKKGKYTLKTSYFGLSVKNKITVK

SEQ ID NO: 11903 - protein, 1903 aa, Methanobrevibacter gottschalkii
MKNKIFIIGLIILILFISISSVCANNENSTLNTSIKINNDLNQINLGNEINLIDEAPKEVLQDESEISITPQNYNKYFNVYTGKFKSDIVSSKITTVKIGNVSKCLFAFEKPVNLMPIDSSCQITNGVIHLLPGSDGSTISGLKIINNDSVGDIKYGGILISRAHGIWLTNSSNNLIYNNTIIIGNQKGCYAMPMGYSNNNRILNNTIISGLTSCIVMGRSCYNNISNNYIEICGYELFTTSNLIFFNPWGHADYDDGVAECNGNYIANNYLKNYGTGIWAITLSLGYYSGDTQVINNTIIKGSSGISTSDMLFTQPKNILIKDNTFIDCPISILTCSNNVTIEKNKIFGSSEDNAIYIQANDAQLYNHSVTISDNYIEFENLGCAILVHSDNVTVVNNEIHLSRYGTGIGISPTDFPKASSNNCKIENNKLYLSGDMGIRILGHNTTICNNYISTKDKGIVISSSGYKIYNNTIIANIILSDDVPIYIEGHVVNSTVMYNEIETNNSEGIHFNPSGDLSDYFGKVSENTINGIIENTETIIVNDTNFYDYFDLSGYLNYEFKPNSKKIIFFTFLTNKNIYFTDKIFLSSNKMYNLLHNVSIKFFENASGSLIQDLNFYNIGNNSIILDGVNDVSINNNDFTILSNKGKNISTISVIGGENCIISNNNIFMNSKSNFTTAISISNPNGAIIKKLSKNFKIFNNNILIKTNGIARGIYADSLVETNILENKINIISDSSAYGISIENTNEIVYNITIDNNLVVINSKEMSYLIKLQMIGTSDIINNYLVGSSNGICGIGAYNSLNLNINRNEISISGKKPINFPVFDELGRNNVAIYLKSTVINGFSRNIFDIENSTILIKDSSSIIKNFNVNSYVIADYNHDFYFDSQNKLKSNIINDNSIILFKNFTFKKITNINIPVIIKPYKNLNNFTATLILSENANKSSIYGFNFINANINLNGVDNVNIFNNSFKCSEITDNNGLNNIIFNNSFEFKLNNADGIIFNGCAGGIFTNNYILIDSKKSNFILIRKANGTKVNNNYINATGDSLVLIKSDSSENTQILKNIINVTSTGDFNVYNAFKTHFDNISNNEIKCRGTSNSAVIYYDSSSSCNKIEFNEIISSSSNGREYAVVFDTKHALSNTIANNYLITSNGYRRGNDAVYAIFELVCNNTPVTIYVSINSTEDGNGSFTNPYLTIHQALENSLSGAIIYILPGYYKESNLIVNKNITLTAINNDGAVYIDALNNQLFTITEKGSLTINALKIFNGFSVEGGSLFFNFGSLIINNSVIYNSSSYYDNSNPTFKFTNIQTPTLSYSYDCENLGLGGAILNYGNLLINSSTLFDNFAHKGGLLADFGKSTIKNSLIFNNTAVHGGAIFTDSSHEFNIENSSFLENLAIQTLDYCYIQRKSLDSGGYEYRSLCDMRPGYGGAIFSNSSLIISNCLFERNIAKSGGAIGHYSKIELNSNRQGPNYYAVNQNVYSQFRYVPKLKIENSIFRYNEAKDTSCGNLSMISDRMYNYYYSINYNGGAIFGSLSQLTIFNSLFEHNVANTVGGALCVQCENSVIESCKFYNNTAGEYGGAIEAFGTYRIFNTEILNNNAKNGGAIKYTSYNSYGHLQEMMSLFNVTVTGNKALSSGGAFITQVANFAITNSNIYDNSAPYGNTFYGKYGYDSSSNIDARNNWWGSVDGPDDSVWNSANSKFKNWLNEKVNWHVPHVSGGSSNNDESGIGNQNNGVNSYIPSSVSTGSGVHTGSTLTNNVKSSGASSKGFSFTGNWPSGTANGFNNGGSGEGNAVNSKDNSGNSRTSIAGNVKNLNSVSKINSSNVNNLFSVGMDANAADSSASSASSSQGGADESFSNAYEIINEVKKENNQKFSIFNILLIIAWIFFVVGFYRKYNDNEKEI

SEQ ID NO: 11904 - protein, 1753 aa, Methanobrevibacter gottschalkii
MKYSKLFLISFVLLFFIVSAVNALDASEITLNADNSIDEISNEDMGILNEVSPSNDIKHIYVNDTGDDSNIGSINSPYSSISKAIGDVNSSTNTTIYLSKGTFGKNNDTNFQFTNEINTYFDNCNVTFIGEGTDKTFIDGKSTYKFMTILEITPNLVFKDITFVNFRGRGSSVFELLEAGNLTIDNCVFKDSYSTSNGDTISSSNSGDLKIINSQFINSNGGIISLLYEDVSPGTLYLENNTFVNITNSENNGIAVTSNYAKAVIKNNKFNNITCINQNQVTLYLEAPDEGTLVLTDNNFVNCECLNEYFMAPVYLWAYEEYVIFERNIFLNSTGASGFNILLNGRMDNLNISIGADEINVHNNEINHGVNIPINITDDVGNLVLINSGIQLNLIGDNNNYTPYLSLKNKKLTFATVPESGIYNVTITYNDGLSTTEVLTIIKINISSSPVNIWVSPKGSDSNNGSEENPFKTIQHAIDTGFEKSFNVIIYLDEGIYYGESNVNLIITNKGSLQIIGKKYNKTIIDGEHSNWFLSVDTCDVEVKNLKFINGAGNKNLISGSNLLNLKDCIVDSNIASRNCYVLHQTLFDNLTYTNNTGTIYYNYNRNITKSNFINNKNIYDSTGIIYSSWAPIIILDCKFINNTALYDYGVIYSNNNIMSLNNYYYGNKAKNYGIFYASSYSSNKMILINDTYINNHVDGSYGIGISPYSSVVNCKFINNSAGTDAGIGSITITCSFKNCSFINNSATKGGVFVLNAVQHALGTTYEELISFDNVTFENNKASMGADIYLPPRSSNSYYSYTYPIELTITFDNITVTSLTDNLTASVYGVNGIIVGGAILEFYLNELYIGSSQIVNSNAILEYDGFSNGKAIVNGNIIHPSVKNNINNATLDIKLDNVLNHIDFWVSNIGSDENGDGSKTKPFKTIQYAVNKAFENCRDITIYLGEETYSGENNTNLTISSASNITIIGKGIGKTIINGGNSSYFVKILIGINKIIISDLTIINMTPDNRFDLPIGSTSPSGIHSIIKSGSTSPITVDKGATLYLNNVNITECRGGNAIIDGEGNIFIDNSILYKNGVSKGIIKCENLVINNSIIDKHLVGGYPIIGTNIIINNTKITDVFNIIRNGFYFISNAKNTTIENTCVLINNWENPLNILDIIEYYDTQICPAACIASTNAIIKNSSFKNEFELVYLWQSTTDYSYHNVYSGSNIEAVNSSFEGYQFIIYSRMLQNPIYKFDGCTFNNIANLMIMMQSRNSIVSFSNSVMFISGNKIASNNAFNNSFLFNNNYWGNNSKPVIPNSVSNFQIPSPDNWIILISEGEEPVFKLTDGKNVTEYICNLPAKISYVADENGEIIPVLNLNGNGYKFNVDENGNVVLNISAPMKNIVPKVPVDETVFANDIEVIVNSSSNFKAKFTNKWGDSLKGINVSFIIGENIINIITNENGTAILPVDFDLGVYFVKIVNPVTGQFIFKTIDVILENTVTANDIIVKYNDKSKFSVIFTDKFGNPLINTNVKFKVGKYIINRTTDENGIASFVINFNVGNYAVNTINPVTNQSIDKIITVNKIATKLTSPKLTVTYNAGKYLTLILKDFNGKALINQKVSIKINGKVYTKITNSKGRSSLKINLPVKTYITTLTYAGDRNHIKSSATTKVIVKKATPKMTAKKATFKLKTKTKKYSIILKDNRYKVMKKVKVYLKVKGKTYRAITNSKGKATFKITKLTKKGKYSARIKYSGNKYFNSITKYVKITIKR

SEQ ID NO: 11905 - protein, 163 aa, Methanobrevibacter gottschalkii
MSGKSKINVFNKMTKTALDEEISAYVAYHRYYQRLIAVKIVSEGNTILDAAKILGKSYQTVHRWIKTCESEGLEGLKPSFGGGRPSKLTYDQLMELDKIIEKTPNMSMKDVHILVNEKFNVNYSLKQIGKIVRKLGYNYSKACPKFSKSLEDAEEQLKKLKRT

SEQ ID NO: 11906 - protein, 78 aa, Methanobrevibacter gottschalkii
MPHDHLAINGNSTITITNSSTAPEIVMVILELRCANTKNKNSTKSLNKIIEEVKLTNEEIYKILMENNENNIVFREKL

SEQ ID NO: 11907 - protein, 441 aa, Methanobrevibacter gottschalkii
MFESLKKKFSRTSEKLEEELIEEAEKEDNLQEEEGKKFSFFSFGSKKENMEEDESNLLSEAEGTVGKETENEIPGGDSIEEDVDEKSGLLSRLRGSSAKENIEETSDEEKIIEESQDEEKSHFWSRNKDNEDNSVDGEAGGGIFSFVREKTIQEKHVEDILFELEMELLQGDVAMEVANEIVESVKEDLVGKKIKRSNDITEYTFLALKNAVSDIISIPSKSMTEMIEDKKAEGGPLVVMFVGINGTGKTTTIGKLANFYMKKGYTPVIAASDTFRAGAIEQVTYHADNVGVKIIKHKKGSDPAAVAYDAVEHARAQGKELVLIDTAGRMQTNTNLMDEMKKIKRVSKPDLVIFVGDALTGNDATEQAKKFNEAIDIDGVILTKADADSKGGASLSIGYVIKKPILFLGMGQGYDDIMEYDSEWMLNQLFSDNDESEIIED

SEQ ID NO: 11908 - protein, 360 aa, Methanobrevibacter gottschalkii
MKISKINLILSVVLAILITMATTASLLSNANDSFSKAEPKGNVSIAITGDVMFARNMPGVLSADSSPFSGVSNVTSNVDLLLINFENAATSSENAVKGDVPLKCDPRYVPLAKGNNNTIASLANNHAFDYGIDGMKDTIENLKNAGITPIGAGENEKTAHNAVTQEINGRNITILNYMDSDNFAEYSYDVMPYANGSNPGYSVFDLADAQKQIKENNGSDLIVVYMHFGNEYSNSPNDNQVKIAHELIDSGADVVLGSHPHVTQGIEMYNGKPIFYSLGNFIFDQSNPATHSAYFVQIDLVNNTGECSVYPIVISGYLPHYMDSDSGNSLLNELNPNADELEVSNGVGKLRFNLTEGDSN

SEQ ID NO: 11909 - protein, 579 aa, Methanobrevibacter gottschalkii
MISCVSAGDSEMQQVNNDSVDSANQYVEPVKNASFSKVSNTNYLKDSNFTVSLKDENNEVIVNKTVYFTIDDGLVINTTTDGKGSAKLLLNISKGTHTVKYIFNETGFTPFKSSTKVLVITTSNSKIKASAYKSYIGFKKHYSYAKHISFKNTYKITLTADGIPLSNRIVKFTINGKSYSKKTDSKGVASLPIGLKAGRYPIKFSYAGEKNIKKVSGSSIVYVIKGMPKKIIKANSLTYKNKVSAPFKIKLVNGRGNILKNKKVTFTLDGRTYTKYTDNNGIATIYLKLSWGTHSLKVSSAKTSYYKSVLKKYSIHIKSKAVNNGLWMFSSDMKKANLASLKKVGTKHIFLYAKAIDVWGRSDVEKFIKTASGYGIKVHLWMKVFNDDNDKWINPVKKGKINYGLIKSKINLAKEYAKVKGVAGIHFDYLRYPGNAYKYSNGVNAINYFTKAATSAIHAINSRFIVSAAVMPEPSDMKYYYGQDISTMGKCLDVIIPMIYKGNYNAGSSWIQKTTLKFVKKSGHAKIWSGIQTYHSDRSPIKLTSSALLKDADAAAAGGADGVILFRYGLTNLINFNKL

SEQ ID NO: 11910 - protein, 513 aa, Methanobrevibacter gottschalkii
MMNKLSVFIVIIIIALSISSVCAGDSDHNKTDDSILGEADTSTSSNITRIGVNSIYDDGVNETIKTNSSFVSSNVVTYETFSTKITVRLLSNNNPLNGKNIIISVGNVSYNKTTDANGKVVLNVKLAKGKYNAMFSYGGDENINPCQKTTTVIVKTPIKTKIYCADKNINYRQDLKNTFIVRLIDGNGKALKSQTVTFKVNGKMYIAKTDKKGYAEVCLNLKKGSFTVGFSFYKKSPYSHSHGSYKIKVKAPIGKGNGYWLWPAHMKHLNLKSLSKLGTKHIFLHVQAISVYGKSSVISFAKKAHRYGIKVHLWMQVCCIRGDKWVRPVNKDGSFKYSFINKKVKEAISYAKIPGIDGVHLDYVRFGGTAHLYKTSTQSINYIVKKTSLGIHKVKPNCIVSAAVMPEISKMISWYGQDIPTMGKYLDVIVPMVYKGNFNQKTAWITKIVSKYKSQSKSAVIWGGLQTYHSDNNVKKLSYSALLKDAKSSKAGGATGSILFRIGLTHYLNFKKV

SEQ ID NO: 11911 - protein, 125 aa, Methanobrevibacter gottschalkii
MNAFDKFLIGDTSSINWCFENRHFLDRLQDNGISRQYVVDCLMNEEPIKYEHIDSSTYAAVYDAPSNKDYKEIRILMAVSGNSIDLVTIMRNNETTTERQKRQYQSQKHKNIEKKRLNAISKRKW

SEQ ID NO: 11912 - protein, 484 aa, Methanobrevibacter gottschalkii
MSEQPQWDSSISFIFAMIGAAVGLGNIWRFSYVLYSNGGGSFFIPYLIAIAIMGIPFLILEYGVGFSFKESFSSIMRKIKPEFEVIAWILVLFVFVVTIYYLVILSWDLVYLFSSFTFNWGTDTASYFVNTVGGSSDLTNANFLLIPTTVCVLLLWISVWFISHRDVDSGIGRVSKILIPALFVIMGIIIVYALTLPGSVVGINALIHPNWNGLLNVNIWLAAFAQIIFSLSMGQAIAITYASYLPKNSKLIDNVLIVVFANSAFEVCTAFGVFSILGYMSFINGTPITDLITEGTGLVFIVFPMIFNIMGSVGRILAPMLFLAILFAGITSALGYFEPMLSSTSAKLGWSRKKAASVLSIIGCAFSVLLTTGISSYVVGIIDSFVNEFGILLLIGVQCIIFAWVYGVEHFLPLLNEYSSFTVGKKWIFVIKYLLPFVLIIMWVVGIVQLFTTADVFEIAIDLIIIASVLVSAVFLTKLKPSGE

SEQ ID NO: 11913 - protein, 73 aa, Methanobrevibacter gottschalkii
MVRNKRLNAVISFILPGLGQILNGDEKRGIKFLIGMVVLHIVIYYALNNVVGSMISTLYHAYSAYDAYKTCEM

SEQ ID NO: 11914 - protein, 243 aa, Methanobrevibacter gottschalkii
MQNTSKYFNLSDMMVEYFNFENKERDIPYYNHNPRLTKHAWIVLLSSVLISFIFYALFEDVSEFFASFIFCAILLVPLMYYSDWDFSLIFHRPTKSEIKLALILFIGYLIYAIILGGVIEALLSITTTTSELTVNAESLISLVFSMMAEELIKFIPFVFIMRLVYKSTSNRKLSIITSTFIVLIFFGLLHYDFETSIISVLLLQGLGSLFELYGYIKTKNLFVPYLSHLLTDAVIFILILFGL

SEQ ID NO: 11915 - protein, 144 aa, Methanobrevibacter gottschalkii
MNKKIIGVLLVLIAAVAFGSVVYAAETVTIGGFDFNVPDGFTEDKSHEIVNMEKEQGGIKYINNGKLFENDKGDVVNILVAKYDGHKVTNKIAKGIADEPKTIGGVDGYIVHNGTFTSFDYAKEGKLVVITTNNEDAIEGFIIE

SEQ ID NO: 11916 - protein, 208 aa, Methanobrevibacter gottschalkii
MNKKIIIAAIIVVIIAVVAGFMLTSSNSQDNSKITIMGNGSIHENGTIGIKLTNGENTALKNKTVHVCVKDSEGKIVVDKTAKTYVNGVVGVRLTNVSAGEYDVNVTFEGDENYTSSSVSQKLKIIAGESDDDPTYPVDEDTVTTTADASSTQSSQSSSQSQSYTPSRSNDYGGSSSSDDDGGLDADYDENGNEMLPTVDEEGNEVSN

SEQ ID NO: 11917 - protein, 158 aa, Methanobrevibacter gottschalkii
MSFNKKTIIIFLILISAFLIIGSVCAENLKDFKATKMLKKLTKQKTLTVKIYNFKPGVLWAPKAIKLKNGDAIAGYVEYKGNMQFEKGTGITSWYIGSGLDGDIEPHHTKLIKAKFFFKNKKGKVKTKTVKGNGGGHISTSLIKGYVPYKAKVSYKTY

SEQ ID NO: 11918 - protein, 561 aa, Methanobrevibacter gottschalkii
MNFEKSIGAHVIFFDGNYCVKGYNDSFANFFDIEEDLTGKHIDDLEMPADFADFILSGEEEIELSLNVKNRWIDVKKETINTNGALIGHFFILEDVTDQIINNQELIALNSVIGDVQDVMSMSIHFKDAEGKYHWTPETYALIDREPRLGDENNNIFDSITVQNLDNIADNRPNIDDDVYVEDFTIITESGKTKYLRGTAHNVFDDEGNFLRLIMTAQDLTKEHLQEANLKILDSLMSDSNYQLGVGSYVHEIGSDYFCISKEAVDIAELNENEDSHMQLKSLSGNFVDSDAFKKEVGKLISGELDKIDNVWEYKSPKTGQIKKLHVINSIKVVGGRIFSFGGIKDVTSEMEKQEKLKHHNMELEMLIRESNHRIKNNLNLLLRFISLEKRFNKNNPEKIIENTVGRIESFSLLHEKIYNVDNFKDINVEEYLNSLISGLYSIFGDDGSINYNSNNNELILNSEILVPLSLIITELVINSIKYGYVDYELDNKAINVSVDKFDNKLILHYSDNGKGLPKDFNPHKSIGLGWRIINSLISQLEGEYEVFNDDGMHFKLTFNI

SEQ ID NO: 11919 - protein, 142 aa, Methanobrevibacter gottschalkii
MDAAKYNIEENVMKTLNVVAAIIKKDNKILATKRGYGEFTDMWEFPGGKIENNETKEEAIIREIKEELDCVIEPTKFALDLEYQYPTFYLKMSCFEAIIKEGTPKLIEHNDAKWLTKQELDSINWIPADIQIIDYLKETMRD

SEQ ID NO: 11920 - protein, 49 aa, Methanobrevibacter gottschalkii
MIDKRLELAKNKKVELELKLKKVKGTPREEDFKLQIEKLEQLIEHLQKE

SEQ ID NO: 11921 - protein, 985 aa, Methanobrevibacter gottschalkii
MNMDEILNGARTAFIDEKLDSSLDFRPKLLHNGKETKVINSIRDELQNCDEFIISSAFITLSGLTPLLEEFRNLEQKNIKGKILTTDYLNFTEPKALRKLQQFGNIEVKIYSQEKEGFHTKGYIFKKDDVYKGIVGSSNLTMNALSVNKEWNVEFTSLKEGEMLSEIKSEFFALWREADDLNNVLPEYEKIYNDNKRFTDLRKITAEIKKKNITLTPNIMQEQFIENLRKLIKQGEKRAILVSATGTGKTYASAFAVNDFNPKKLLFLVHREQIAKQSINAYKNVFKDHENFGLLSGNSKDYDKNYLFSTIQTMSKDDVFRRYDKNHFDYIIIDEVHKAGALSYQKIFQYFEPKFWLGMTASPERTDGFNIYDLFDNNIAHEIRLQEALEEDLLCPFHYFGIADVEFCDGEIDDSFEDFNLLASDKRVDYLIEKSEFYGYSGDRRKALVFCSRKKEAELLSDEFNRRGYNSTVLTGDDSQEKRIEAIDRLTNDENPDKLEFIFTVDIFNEGVDIPEINQVLLVRPTESPIIFIQQLGRGLRKYENKEYVVIIDFIGNYKNNFMIPIALSGDRSYDKDKIRKYLMEGNKIIPGASSINFDEISRKRIYESINNSSFSKIGVFKEKYNNLKYKLGRIPSLHDFAINGEFNPELILNHSRFDSYHNFLDYVDNDYNSTLSDAEVASLKFISKKLIKGIRPHELVILSCLKFNNYFTVNQIEKYLNEKYGLSNQFKSIRNAINYLSMNFYRKETSDDYQANTVTSFVSKEKIIDYEDIFFNFDEEIYNDLENNKDFKFEISHYFKSCLINPVYLNHFEDAVKYAIFKYAQVYKSNDKFRLYEKYSREDVLRLLNWERFMNAQNIGGYKVKYNTCPIFVTYDKKDDISETINYEDQFLSKQLFSWMSRNNRKISSSELEPIVNYTDLDIELFIQKSNDEGIEFYYVGKLTPLEHDQLYREIEGKQHPIVNFKFKISPEVKDELYSYFIND

SEQ ID NO: 11922 - protein, 393 aa, Methanobrevibacter gottschalkii
MASLPLGNDNDLDDTQFYNRVEEISFICDNLELTKKGSTPTILLTGIRGVGKTALMKKLKKDFQNDYLVVYMDLSAMDKFKKNELTRFSFMKLFYESIIKALRHSNIITIDTQILKYFKTRNFKLDKLKSVDKIPIPILKSEEDYAKFTTFVMDLPQQIYDDCKDHIDGVLIFMDEFQMLKQLDEDVNGFLWYIRSVIQSQKHIGYIFSGSMSVKDELIADIAGQKGAFGGRILNYELKTFPFNTTENYLKEKANYLKFTDDGIERFYKCTNGIPYYVNSFARLLPPNEELNEKKIISEFKKALPYLLIHLTNEWYKLNNQEQRIITALVEKPLKRIEIANKLGVTSGAIGASLKSLQNKTLIELDKDGYMIYDSIFKAWLKKEYEEKGNYPY

SEQ ID NO: 11923 - protein, 312 aa, Methanobrevibacter gottschalkii
MDRKYLRENKNSFNIVKNSKIYAKITAYEDTIFIRDLLIKYDWNLDKMPSIIKNEEKYLVLAVIDEKLRLLAKYNTRPDSQVITKLIRKFKRNPNNSAYGLNITKVFDTYVIKKQIAGDEYIFGYYDNLDDAQFVRNILLDNNWDVNIFNEIEFDDETLNYRVISVIDSNVYVLGNFKAKDEIDIKKIREEFLAKISKHKYGLASYPHLDLLKDKISELEEKFNVKTKDGIWSFENISENESVLNQIIFNLTPFQQAVFDAIDKNTSYDQIKKSLIRYNSKNFDKKILRNLDGLIELKLIEKIDDGYSKTNL

SEQ ID NO: 11924 - protein, 62 aa, Methanobrevibacter gottschalkii
MPVITIAGNKGITIEKKREMVKKVSEVVSEAYGLPIEAITVLIQEYDFDDIGVAGELLSDRK

SEQ ID NO: 11925 - protein, 152 aa, Methanobrevibacter gottschalkii
MLGERELVKLFPDFADLVQPSGIDLELDKIYTQESGGSLIDNEKNLPEIKEMDGGIYTLKPHTAYLASIKRKIKIPKGYAMLYLPRSTLLRSFVSVQTAVGDPGFYGTLMFMIYNHGDYEYKIKSGDRIAQAVVFPVVGSGEYNGSYQEVEE

SEQ ID NO: 11926 - protein, 511 aa, Methanobrevibacter gottschalkii
MNVADNIVKILEEEGIENIFGIPGEQIMPVYKALSESNINHILTRHEQAAAHAADGYYRSSGKIGVCIATASPGALNFTMAVATAFKDNVPLLILTGDNELKYRGSDHFQSTPQVDIFKNITRASYNPLNGTEAMYVLRAAIYELKTIPKGPIHINLSKDILLQEDFDDFELCYLCEEDLSNISKAQELINASEKPLLILGAGAISQKENIEMLAHMYQIPVTTTFHAKGIISEEDEINLGIIGIRSTPRSKYAIENADCVIALGIKASERTLPEIPKNLIHVNINKDVLIGNCPIQGKVEDFLLKISFKKAEWLCEILEINNKIEIEGLDVDFKPQASIKRILDKFNDNIIAADAGSHTTWTTLLKKSLKPGQLLFSGSMAPMGYGLPAAIGAAIATDEKIIVINGDGDFHMNLQELATIRENNLNIIIFILNNSEYGIIRQWQESIYGMKPYQVKLNNPDFTKLASSYGIDAIKVDNLADLELILEKELTGPLVVEVIVESEDIPLPKN

SEQ ID NO: 11927 - protein, 85 aa, Methanobrevibacter gottschalkii
MKENIKSFILDIANIKEIIEYDFYETCGFTFVFKSEFLKVKNQINSATIAPIGIIYYENEEYYFAPLANDVNVDIIVKNYLKFKN

SEQ ID NO: 11928 - protein, 185 aa, Methanobrevibacter gottschalkii
MIILIIFFSIIVLLYFGVKISLIYDKTDSKLEGCLQISILRKIKIYTLNLSSLNKDKKNDENEKKTNNDIKQLFKLLKPCFGPFKLFLKSFMKCIKVQNLENHLIFGMDSYTDTAKYIGYIWSFIIIINSSHKNAKLSAEPSFNGIVFDVNGINELEINILKLIPPVLRLISKKEVRTLIKEVKK

SEQ ID NO: 11929 - protein, 134 aa, Methanobrevibacter gottschalkii
MSENIKTTVEELRKLINVENVVGQPIETEDKLLIPVMRMGVGFGVGENILGADKGDAAGAGAGVEPISMVVIPKKGNDSEGVRVLNLSKGNQTNKALSDLGLLISDLVKNYINNDEKIDESEYIEPEFTTADDE

SEQ ID NO: 11930 - protein, 380 aa, Methanobrevibacter gottschalkii
MNETLLMLPGPTTVHPRVLAAMSRAVVNHRGAKYGEILSETNKLMADVFQTSNDAYLLTGSGTAAMEAGISNTVASGEKMLNIVGGKFGERFMKIAQTHGIDAQELAVEWGTAVTPEAIKEALDADEDIKAVSVIHNETSTGVAAPIEEIGKVMKNYDALYIVDTVSSLGGDYVDVDKFGIDVCVTGSQKCIAAPPGMAAITLSDDAWAAADKIDSPTFYLDMKAARKSGNKVPPQTPYTPAVSLTYAMNEALNMVMEEGLEARVARHHKAAEASVAAVKALGLELFADEAVSSATVTAVKMPEGISDDQFRGTTRDKYGVELAGGQDHLKGNIFRIGHMGNISYKELTQAFAAIGMTLKGLGVIEDAGAGVASIAESYL

SEQ ID NO: 11931 - protein, 224 aa, Methanobrevibacter gottschalkii
MNFFSWGKINFKRMFRYAVGLFVMNIGIALSIKSNLGSTPVVAVPYAISLITSVDLGYCNMIFQGFLVLVELILLGRAFKPKHFLQFFVGVIFGIFTSLSMFILSFLPLANSLTFQIIFLISGIVLLAFGLFLYVPMNAVPVSVDGVTQALAILTNQSFAKTKIIFDISMISISLIVLFTFTGHINGSVGIVTIIAAVSIGATVKLINIVYAKISGNEADLKKM

SEQ ID NO: 11932 - protein, 216 aa, Methanobrevibacter gottschalkii
MWVKRILSFVIGLLIMSFGVAFSIVSLLGTTPISSISYSLALITNIDIGITTFIFNAALIVMQLLILRSKFHKKRLLQLINCVLFGYFTDVALYFVAFIPFDSSLWMSVLFLLISIFLTAFGIFIYMPANIAPLPGEGCVEAIAIVTGWRFSTIKIGFDASMVVMSLIMCGLWYTDMFGAVYIGTIISAIMVGFTLRQINNIYAHITGAQINVVNK

SEQ ID NO: 11933 - protein, 239 aa, Methanobrevibacter gottschalkii
MEFGLWEKYYKDIIEDFGFSRSGDEKSAKLLDEILSTEGCLTLDDLSQIVGFSDKFIVFGAGPSLKNHVLMLKENHDLKDYVLVAADGATTALIEEKISPDIVCTDLDGNVDDILLANLRGANMVIHAHGDNIDKVATLSSLFSNVLGTTQAQPIGNLYNFGGFTDGDRALFLSVALGASEIILAGMDFGDKVTKYSRPDLEVKVEGADEFKRKKLLYAEKFTNWITENEPVNVINLLE

SEQ ID NO: 11934 - protein, 369 aa, Methanobrevibacter gottschalkii
MGIEDILMHDESLFQNINAFDPDYVPQDYNFRDTQMEAMAISIRPAMIGGQPSNAIVLGSPATGKTTAIRKVFELVEKSTEKVVCVYINCQLHTTRFGIFSQIYKKIFGHIPPETGVPFSRIYDQIMQNLQKNNKSLVIALDDVNYLFQSKTANKVFYDMLRAYEEYPGVKTAIFAILSDLEFKYAFDKNVNSVFIPQEINFPLYTYSEIEDILKNRAKAGFFPNVLPEDILEQIAMYTYENGDLRIGINLLKSCGNFAEASASREVTQEHFEQAIDSLVSINIRETLNSLNDMEKDLLKVISGWEGVCKAGELAEMYREKTNSSYASFNRTLDKLEFVRLIDTKFTGKGVRGNSREIILRFNPDEYLI

SEQ ID NO: 11935 - protein, 59 aa, Methanobrevibacter gottschalkii
MFENNDTTIQVDLRKKNSLKEEIMYKNIDVQSCMVMLVVIAALLLSVISVVAAQNPYII

SEQ ID NO: 11936 - protein, 137 aa, Methanobrevibacter gottschalkii
MKKFEYFEVTADIGFKAYGKNLNEAFENAGLAIFNIISDTNYINPTKEISFEITSEDNVSMLYDYLEELLFYHEVEFMLFSEFSVEISEGFSLKATIMGEEIDWDKHERKSEIKAITFHKMEVLETNPVKLQAIVDL

SEQ ID NO: 11937 - protein, 106 aa, Methanobrevibacter gottschalkii
MKRTRIVSRNFEMVLGIIGSIIGSFSGSILLFLGTFYNVPTPFLGFVAIIASFLGLASSVYVKKDTEIAGVGFIIATMFVIVGSEYINIISAIFLLVAGVSALFRK

SEQ ID NO: 11938 - protein, 482 aa, Methanobrevibacter gottschalkii
MSIKDEIKKIKDNVYEIPGSFNKKMRASGRFYIADEYFDELEEGAVEQIVNVACLPGVQRYSIGLPDIHFGYGFPIGGVAAFSLRNGIVSPGGVGFDINCGVRLIKSNLTIDDIDGKLDELTEKLFKNIPSGVGSKGKIRLEENEINDVLDYGAEWAVNNGYGWPEDLEVLEENGRMVDADSSIVSEKAKKRGIPQLGSLGSGNHFLEVQIVDEIYNEEVAKVFGLEKGMIVVMIHSGSRGCGHQVCSDYLRVMDKAYKKYKVNIDDRQLACAPLDSKEAQEYIQAMAAAANYAWANRQMMTHWVRETFEEVLGKSAKEMEMDIVYDVAHNIAKMETHKIYNREEEVLVHRKGATRAFGPGCEEVPEKYRAVGQPVLIPGTMGTASYILHGTDVAMEETFGSTAHGAGRILSRSKAKKDYNADEITEDLESKGIKIKATSKNVIAEEAPGAYKDVDSVVRVSDETGIAKLVAKVKPLSVCKG

SEQ ID NO: 11939 - protein, 252 aa, Methanobrevibacter gottschalkii
MIGIIGGSGVYEITQKADSCSKKVVKTDYGEVTVSILEIFSKKIAFIPRHAQGHSIPPHKINYRANIDALRNVGVTQIIATNSVGSMNIDMAPGSFVVPNDFLDFTQNRIKTFYEDKVVHVDVTEPYCPNLRDILDRSGDVILGGTYVCTEGPRFETPAEIKMFKMLGGDLVGMTGVPEVTLARERGICYNSICIVSNYAAGISSNTLTIDEVFDIVSEKEHDLLELIYNFIKNAEDSPNCECHHALNGAEV

SEQ ID NO: 11940 - protein, 107 aa, Methanobrevibacter gottschalkii
MRLAVVSSDGENVDLHLGKGKSVYIYEYVENKLNFIERRDIEISDDSKHQGGKVIKTCEDCDVLISLQYGFKSKIKADDVDLKLVIDEGPIDEVLQRYIDHYNFMHK

SEQ ID NO: 11941 - protein, 185 aa, Methanobrevibacter gottschalkii
MSKYIIVTGSPRVGANSDAIAEFIKESLGTNDVEIWNIYEKDYTYCHADNACKELGHCSIDDDATDLVADLKEADGAFLISPIYFGRLPGPVYTIIDRFYGVFNPAKGLDVPSPDKKIGFVLTMGGDEEAVKNAEPVAAQAGFAFSVVGFGASDSVILGGNNDPTAFANSDEEQAKVKTLVDWML

SEQ ID NO: 11942 - protein, 193 aa, Methanobrevibacter gottschalkii
MAKAKARRRVRDTWKEKSWYTIKTPVNFEDKEIGETPAKDPELLIGRGVEVTMRELTGDFSKQYIKLRFEIDNVAGEVANTKFTGHKTTTDYVRSMIRRGTSRIDASTIATTKDGRKIKLQVLAVTVRRAKSSQQKYMRKVIEDLLNEAAAEKSFDELIKVVVNGKLASEIYHNAKKIYPLKRVEIIKSKVIK

SEQ ID NO: 11943 - protein, 69 aa, Methanobrevibacter gottschalkii
MKKIFQNLILQPRYETKTTNTINIANIGLAASFKLFTVTSFPLNLNPIDHKAKQAKINNYQVADNNMFV

SEQ ID NO: 11944 - protein, 231 aa, Methanobrevibacter gottschalkii
MYGIMINWLYVILLFILGFITYRRQSLDLFGSAVMIIMGIVIIFSAGTNWLLLIVLFLVLSLIATKFSKKYKLSLGEFEGRRTSKNVISNGVVACFMAAFGGYYSPFVGGFIGAIATATADTLASEIGVLDPHPRLITTLQKVDPGTNGAVSVLGTVSGIVGSAIIGIAAYFLGIMPNPFLAILVSIISGTIGCFGDSILGALFENNGWLTNEHVNLLATIFGALVGILLI

SEQ ID NO: 11945 - protein, 412 aa, Methanobrevibacter gottschalkii
MKGLILIMDGMGDRPIKELGNKTPLEAANTPNMDKMAEEGITGIMDSIAPGIIPGSDTAHLSILGYNPYEVYTGRGPFEANGVGVDVLPGDIAFRCNFSTADENLIVTDRRAGRIKEGTEEIVEELNKMVLEDYPEIKIIFKESTGHRAVLVLRGEGLSGKVSDADPKVEGNKPKEVKALDDTQEAKKTADILNKLVFKTYEMVKDHPVNLKRIEEGKPPANIVIPRGAGEVPVVDSLNDKYEVNSACIAETGLIMGIGRFAGMDIIEMEDVTGGIDTNLENIRDTIIDQVKNSEHDFFLVNIDGADEAGHDGQTKEKKEFIEKVDCVIMGELMKLDNVYIYLTADHSTPISVMNHSGDPVPVLIRGPEVRVDDVKEFSERACAKGGLNRIRGSDVMNIMMDLMNYAHKFGA

SEQ ID NO: 11946 - protein, 445 aa, Methanobrevibacter gottschalkii
MVAKKLFGTSGIRGRIGSEVTCELALNVGKSLAYYLGNSGTVVLGYDTRTTNQMLDQAICAGLLESGVDVIKIGMVPTPLVGYATEKLDADAGIMLTASHNPSQYNGIKLWNKNGMAYTSKQETEIEKIYANNDYISVNWDKIGKLSVNEEIKGQYVDDLVNLVDIKEGLKVVIDCASGAGSEISPLVFRKAGCEVTTLNSQVDGFFPGRNPEPNEENLQTLMKTVVAIGADLGIAHDGDADRMITVDENGNVSPFDSLLALISKEFDGDIVTTVDAGLCMDESVKGKVIRTPVGDVNVAEAIIEKDASFGGEPSGTWLHPDFCMCPDGILSGLRIASIVSRDGKLSDLLDSIPSYPNIREKIVCSKEAKIKVMENMENLLINAFDDVADVNPLDGVRLTFEDDSWVLIRPSGTEDYIRITLESRDAKRAEEIKEVCVKIINENL

SEQ ID NO: 11947 - protein, 57 aa, Methanobrevibacter gottschalkii
MTIYVCLHCEYRFDSEKGDPAYNIPAGATPADMPDDWVCPECAALGIEAFIAEEEEE

SEQ ID NO: 11948 - protein, 435 aa, Methanobrevibacter gottschalkii
MKAIILCAGEGSRMRPLTLTKPKTMLPVAGKPIMQYNIESLRENGIEDILLIVRYKEEMVRNYFGDGSEFGVNIIYQRQKDFLGTADAISYGKNFIDDSLIVLNGDIILDDEIISDFINKYDELKPDTLMLLTEVENPSAFGVVEIEDGYIKNIVEKPKREEAPSNLVNAGIYIFNKDIFDKIDKTEISQRGEYEITDSLTMQIEDGLKVMGHKTDKDWIDVGRPWELIEVNEELIGNLKTEIRGKVEDGAHIHGEVFLDEGSVIRAGVYIVGNVYIGKNCDIGPNSYIRGNSYFGDNVHVGNAVEIKNSIIMENTNVSHLSYVGDSVIGSNCNIAAGTNIANLRFDNKSVKTKIKDQMIDSGRRKFGSIIGDSVKTGINSSFSPGVKVGHNSTIGSGVLLYNDVPSDTRVLVKQNYIIQDKNIKNDIQDKNIKK

SEQ ID NO: 11949 - protein, 160 aa, Methanobrevibacter gottschalkii
MENIEDSIVICPGAQVFGDVELGENVSIWHGAVIRGDTDSITIGNNSNVQDNCVIHCTKGFPVEIGDNVSVGHGAVVHGCKLDDNVLIGMNATVLDGAHISKNSIVGAGAVVSEGKEFPENSLILGIPAKAVKQLSPEQVELIQNNADNYVKLSKQYMED

SEQ ID NO: 11950 - protein, 366 aa, Methanobrevibacter gottschalkii
MKARKIVDEMDSYVPGKSQDEIAQDFNLKKEDIIKLGSNENPWGPSPKAMDAIKQEINTINRYPESQLGELASEIARYSGVDDSQVIIGGDGADEIIDVLAKTFIDAGDEFIVPLPSYMYYEYLLKQYGASPIYARWDIEKNELDVDSIYNAITDKTKMIFLCSPNNPNGALIDQEVFIDIASKNPNILIVIDEAYFEYSEVTNKDLINEFNNVFIIRTFSKVLGLAGMRIGYGLACSEIIEYMHRIKPVFSITRLSFIAALNTLKDTEYIENSIKKGIESRQYLYDEISKIDGLFVFPSKSNFMLINIKETGFTASELALELMKQGIIVRDCTSFKGLDEYWIRISICTLDEDKKFIEILKEVLG

SEQ ID NO: 11951 - protein, 234 aa, Methanobrevibacter gottschalkii
MYIGGTVISSVEFHGNMSLVIFMSKCPLACRYCHNVELLEDNTEWPFDKVKQEIDYSADFLDAVVISGGEPLVQVDAVIEILTYVRQIGLKTKLDTSGIYPDNLKKILDLNLLDYVSLDVKTTFSKYKKITGANVGFQVRKSMNLINDAGVHLEVRTTYVPTLHTKKDIINLVDDIKADIYTIQQFRNKNVLDPALEKVDVPNPHDLVMLAQEIKPYFNGIVKVKSGEFGEQVI

SEQ ID NO: 11952 - protein, 378 aa, Methanobrevibacter gottschalkii
MPILSFSSNDIDVITGKKTRTIRKAWKTPLKVGDRLYCYWNLVSKEKMKIFEAFVTKIEDISFDELKGNDELARQEGFKDSKDMLKEFKKMYGGRIDPSDKFQIIYFEKIHIDDWKGDKIDEKAMISKRADILFDSGKFDKSTMCYDAALKLDPHDVYLLNKQGDNLSRLGRFMDAIECYDKALMIEPDNVYILNNKAIALLNSGNINEALKVSNIAYNYRPSSPIVLYWRGFILEMLGRYDNALKVYDKLIVIDGDNPEVWNSRGNLLTDMGMLEEAIESFDKAVEVCLDDSEMDASAINRMGNAYIDLGKLDEALDCFNKAISLEKNNIDFLLNKGVVLMELGKFKEAIDSFNKVLLRNPDNEDAFFLKEECLEYL

SEQ ID NO: 11953 - protein, 454 aa, Methanobrevibacter gottschalkii
MSNKKRLFGTFGVRRTANDVLTPEFATRLSACYGSVVKGKIAVGADTRTTSPMLKDAVIAGLLSAGCDAVDLGTLPTPAVQYAVRQYYDGGIMITASHNPPEFNGLKFLDEFGIGLPDDIELEIESLYFDSEPIRANWDEIGEKYTNDNIIDEYIQTAMSHVDVDAIKEANLKVVLDCGSGAGSFTAPYLVRELGCEVTTLNCQADGFFPGRDPEPIEENLQELISVVKELNADIGLAHDGDADRTICIDENGAFVLGDKTFTLVEKQMLKENGGGTIVTTVATSQAIYDIAEEYNGEVIATAVGDLLVARKLKDTDGLFGGEENGGLIFPNFVYGRDAALTVAKILEIIAKENKTLSQLVSELPVYYSAKMKTECSDDLKEEIMSKIAAEVKETTDYELDTTDGVKIFKDGGWVIIRPSGTEPIFRSYSEGNSQEQADEMAQWGISLIKKYRD

SEQ ID NO: 11954 - protein, 132 aa, Methanobrevibacter gottschalkii
MRITDEKLLRISLITALIGIIGLIIFTPSIEVKKIDIKDITRSMIDEKVSVRGIITDIKESSSKTNYFLTISDGESRITLIIFEKQVSEITSRNLDIGDFKNKKVEVVGTITEYKSDLELILSSGDSLRIIN

SEQ ID NO: 11955 - protein, 552 aa, Methanobrevibacter gottschalkii
MKYQELVDVYSALEATTKRLEKTEIISEFLKKLDTGTIEKVGLLILGVVFPAWSSEEIGIGGKLVERAVAEAVGTTQATVEDAVRDEGDIGLACIKLYAKKSQMTFFSQPLTIDFVFNSLRKLSQISGSRSTNRKIAVILELLSQASATEAKYLTRTITEELRIGVGDGVVRDAIAQAFDIDKKVVERAQMLTNDFSVVAKTAKEEGSSGLEKLNLTPGTPVKPMLAQLAPPLEEIIPEMGVAICDTKYDGIRLQVHRNNDEINIFTRRLENITHALPEIVRLFDEHLPHENYIVEGEVIATRDGKPLPFQNILHRVRRKHNVEEAIENVPLKVYLFDVMYYQVPMIDEPLKNRRTILESIVDTSVDEMNLSTMKIGTAENIKEIQELFETSIKEGHEGIMIKDASEPYIPGLRGKKMLKYKAEPETLDMIVIGGTYGIGKRGDFVGSYLVALRDENNEFKSVAYAATGLDDATLEYLTGKMKELELSTKGREIKVEPKIVLEIAFSEIVESPEYETGYSLRFPVVKNIRKDKGPMDVDTVERLISMYNTGN

SEQ ID NO: 11956 - protein, 424 aa, Methanobrevibacter gottschalkii
MTQKSEAQKGNITPEMEIVAKQENMDINKLVKLVDLGKIVIPKNINGHSKPCGIGEGLKTKINANIGSSSKIDDIELEINKAKLAQEYGADALMDLSTGSDLKLFRKKIMDAVDICIGTVPIYEAGVVTLGKNKEIIDMDPDDIFKAIENQAKEGVDFMTLHCGITEDLVQKLKDSNRMMGIVSRGGTFMASWINHNNMENPLYENYDYLLELSYEYDITLSLGDGLRPGCLADASDIPQIQELVNLGGLVKRAQDANVQVMVEGPGHMPLNQIKANMELQKTICHGAPFYVLGPLVTDLAPGYDHITGAIGGAIAASSGANFLCYVTPAEHLSLPSLEDVKEGVIASKIAAEAADVAKGLESSWTQERAMAQARKEFDWEKQFNLALDKSKPRTYREKCELDDDEMCAMCGEYCAVKIAKGDF

SEQ ID NO: 11957 - protein, 222 aa, Methanobrevibacter gottschalkii
MFTIKVIFFDTETTGLDCSRCKIIELAMLTVENGIVIDKYDEFIDVEEPIPPKISALTGITDDMIKNEGVSEEKVANDLKERLTDDTLMIAHNCQFDLQFIYYLLKRHFPNEADKIVSNLNWLDTVSVLKDRKKFPHKLIDAVKHYNIPEVNFHRAIDDTKALYKVTLAMKSERDDLRDYINIFGYNPKYGVSGRRFDFIEYKSQFYHQRIVAQEFTLPNRR

SEQ ID NO: 11958 - protein, 277 aa, Methanobrevibacter gottschalkii
MSEHIIEALGLSKVIIKDGKVIDVSEPQVEYCPLFDHHRGIKKLTSEIIAKNIKFRIDDFGMCMPNRQLRMKDFLNFGISEIMCTLLDEKIIDSVVMVLEGCGTLIVTESELVQGIGGRVSGLVKTSPIPELIDKIGKENIVQPETAEINQIKGLELAIKKGFKNIAVTITLASDIDEIERIKSENPNVSIYVFVVHTTKRNAKDARKLFDGCDVITSCASKYVREIGKKESIKTVGQSIPIFAHTEDGKRFLEMRLKKIGGEKPKIDNPDLPYPLI

SEQ ID NO: 11959 - protein, 733 aa, Methanobrevibacter gottschalkii
MAENEITLKVAEAISQKDVGQGVARLDPNVMDDLNIHERDLIEIIGEKRTAAIALPSQTDIGLEVIRIDGLVRKNSGATIGGEVQIRKIKAVEAKKVVLAPIENNIRVQGDVRGLFAGKVMVQGDIIGSQIRAPKPSMNMGFGSLFDELMDFTPAMKEIKFAVVSTNPKDIVIVGPNTEVQLYETPVDVSKIEGVGNLVDVSYEDIGGLKEEVKKVREMIEIPLKRPELFEKLGIAPPKGVLMHGPPGTGKTLLAKAVASESDAHFIAINGPEIMSKYVGGSEENLREYFEEAEENAPSIIFIDELDAIAPKREETNGEVERRTVAQLLTLMDGLKSRGQVVVIGATNRPDSLDPALRRPGRFDREIEIGVPDSEERKEVLEIHTRNMPLSEDVDLDKISNTTHGFVGADLESLCKEAAMRVVRRILPEIQNDEEIPKEVMEKIVVTGDDFKNAQKEIQPSALREVLVQIPDIKWDDIGGLEDVKQELKEAVEWPLKHPETFKRLGIRPPKGTLLYGIPGTGKTLLAKAVASESEANFISVKGPELLSKWVGESEKGVREVFRKAKQAAPTVIFFDEIDAIASTRSGNDTDSGVTKRVVNQLLTEMDGLEELEDVSIIAATNRPDILDAGLMRPGRFDRHIQVDEPDEETRLAIFKVHTKNMPLAEDVDLKKLAKNTEKYVGADIESVCREAAMLTLRKDLDAKEIPYKYFKEAIDKVKPGYSSNEEQLVQYM

SEQ ID NO: 11960 - protein, 448 aa, Methanobrevibacter gottschalkii
MKIKVITNLKLLMIKMNVGIIGGSDGLGKTIVYYLRDEFDVYITGRDHKKGKEVACNLNVNYIESNTDLAKISDIIIVSVPIHHTSDVIREVAQFMKAGSLMIDVTSVKEEPSRTMEEVLPDTVEYIPTHPIFGPRTTELDNQVIVLTATKKGEWYRKVYDYLNKQHMRIIETTAKKHDYMMSIVQVLTHFSFISTASAIEKLKIDISETEDYESPIYNLMIDMIARIVAQNPYLTYHIQSMNNNGPKIRNTFADAVIELRDVINNEDDEKFVEIAIKATKHMGDIKNALGRSDKAINGLNHEFTLLNKSIGTEVGLRHIYSGKIHVGILEKIENKTAILRKRNKVKKLRIANIEVLSDNELYEWKINNLDKKRESISCVFPKRVDAEVIQDTVMNIANIIDIKLTDTYNGPQISKNSISLTFEVIALSKEDIEKIKELFTGFGGVIR

SEQ ID NO: 11961 - protein, 1490 aa, Methanobrevibacter gottschalkii
MKNSKGKVLTGKKITVNYSGKTYSRTTDSKGCVSWNVQKKPGTYSVKFTFKAKGYQTSSKTAKVTVKAMPTSLTVNNLAFTYGDGNNKLKATLKDKKRKVLVNKTVVFNFNGKNYNQKTNSKGVATLTIGAGPKKYTTTISFTNANYLKSKKTVTVTVNSIPTSLTVNDLTCNYDDSNAYLYATLKDTKNNKFLSGQTITFKINDKSKNVVSDSNGKAGIKIEEKSGTYNVDVSFAKSPYASISKKINLNVQGALTPEINMHNGFYNVSNLLVDFTGDNAEYIVYCSFDNGASWYKDNHSLSFNLTTCNWSIIYYSSFRGFNSTINHVNYVLDGDVPLVWASHGSGIYNTNFQVNLTSVDLFDEKPIIYYTLDGSDPTVQSTIYSEPINVVKNTNLRFFAMDTFNHRSEIISVYYFIGNCIANLNNGKTYNTIQNAINDDKTKKGDIIEVNKDIIIENVVINKNIYLISNNVIWQSNNKSPIIYMKNVNNTFIEGFTFKSDNGSGIELNNVSNCVIQNNNFYNKYGFSIHNENKDNDNLNNICIQGNNFYDNYYNYINFEVLENSKIINNNFESNKNVSAITILNSKSNILINNQFTNLNYGILINKSYDDVFFGNNFSINNIGLYLNCVDSKVISNTFINNHYGIYSINASNLRINFNRIVDNSKFGVYCKKGIVDANNNWWGKNYITNNALNSGDINNNENIGINCSAYLVLNVYETNYKIDNGIVYNVSYVANLRSNNYGEIFNQYFIPNCKIVYNMYCEYLYDNGVVYRGVNRIIDLMLSEGSSIKEYRLGFLNNLTVTLDHQNISFFRESSFNAYATIDIVSSAIFNGSNLDISVRVPLVDNVDWFSIVCRYVGNFKSELLLIYNGEVRNTIVIESSFYNEAKNVFSNNFWNALDTYHSCFSGYRNKQICAYAYLYLNDPSLNTIELLDNKLSKSNIQFKLQDVYNLLANNNITLNDILLNLIKNSYSLSDLEMSFIDYANGNLFDTMSVSLKYPGNDRLFFAFEDTINKTFVWRGDSSVSLYNIHYVNGGYFDLTAPFPIGDNGDLIYDNGNIYSINYNCIYTFLSSDYDCLKTYTFANSKINNNALNYWLNQKNRTDVNGELYYNIGYMKAAYGSFLEGLLVIYCNDVVADVSADKFNVSWTRVNPMVMSVCDSLEGYYLTGESDFNFGREVVGDVNNIKSFNFACSASFSIIEKYVIDALFPNEGNKSSAMFSLIDSLFNNGTLEFIVEGNYTLIRSLNVSNVVFVYDETTGILRDCINGCYGAYCYASQQTEWGHNFGENSLKLEDLIVGIINGIDTSLDNMNNDWLGFAGCLAITIGTGLFLVSNPVGWSIAIGAGLLIGSGMLATYYADDLNKGWNYNRGAHFIFDVGTSMIPAGAPSSLIKWNVGSLGKIVLSDGHLVRHVTKNSINKGFDKYLMNLAKSHGGTIDYGSHKIIRYGTIESISNTMYGTTKKDFIYYSIQYYINKYIIGDIVINKIFSR

SEQ ID NO: 11962 - protein, 107 aa, Methanobrevibacter gottschalkii
MSFDTKRKKLIRHTILINIIVFLIMLFLSIFLNNEVYLQSCPFILLMIGGYISREYTELYFKYKHKYSYFQVFFKVCLFSVIVSIICCEVILRLYFGSSIFLFILNK

SEQ ID NO: 11963 - protein, 110 aa, Methanobrevibacter gottschalkii
MSFNEERGCLMKITICIYLLLLVIFTSLSILFSNKIFLELLPIIILVISIEHVRDYACIYEKYFKQNYSLFKLYLNVSTIPTILFAICCEALLRVYFNSSIILKYLKILT

SEQ ID NO: 11964 - protein, 127 aa, Methanobrevibacter gottschalkii
MEIQPSQFTNSSTAPEIAIALLEIRYANTKNKNTVKILNKIINEVNLTDKEIDEILIENNENNKVFTEKILKIIEKYKDDTTSTIARIIGKHCNRESIQNVKKRREIRRKITLNLLKKENILSKTKK

SEQ ID NO: 11965 - protein, 160 aa, Methanobrevibacter gottschalkii
MSGKSNINVLKNVKKTALDEEIAKYVAYHRYYQRLIAIRIISEGHSIAEAARIIRKSYQTVHRWAKTCESEGLEGLKPSFGGGRPSKLTYDQLIELDKIIEKTPNISMKDVHILVNEKFNVNYSLKQIGKIMKKLGYNYSKAYPKSSKSPKDAEKQLKKT

SEQ ID NO: 11966 - protein, 417 aa, Methanobrevibacter gottschalkii
MASYIIWSFYIVIIHIDILVPLNILFLQLLNQKRRKSRKKNFYDSKINQNSDHTSRKSQSIVKLMKIIKQDTKEGIIEIVPETLDDLWHLSHIIEEGDNASSKTTRRIQDNTGDKLRSDRGVKKTFYLGLDIENITFHLFTGKLRLTGTITKGPEDLIPLGSHHTLEVKLNTPIKIKKRFWPKWAIKRLNQAIDASKKLSAIIIVFEDDTATIGLMRQFGIEYYGPIKGYVSGKRIIDKNRQKNIVQFYDKVIESIEKFDSIQNIVIAGPGFVKNDFYEYIKDNYKNLAKISVIEATGSGGRNGISEVLKKGTVEKLTAENRVAQEMGAINRLLTEIGKNSSKIAYGIKQTKNAINLGAVSELLILDTKVASENMGELMDMVENMKGEVMVVSSEHEGGKQLESLGGMAAILRYEIV

SEQ ID NO: 11967 - protein, 320 aa, Methanobrevibacter gottschalkii
MFYSSIIIAFIIVFIITAVSTAILDIIFRFFGKRGYLGNLYPNVRGGIPRAIGIIPFIVLSFYMIPVCNSMILIIGVFALIDDILGRKKCVPLGIEWGQLSRGIGIVLVMITGILEGYWISAIFIALMVQPLNISDMQPGSACIVTMIMSVITMIFMLIAGSPMVNELPAVYTPLLIFVVCAAYSPLDFSGKIMLGEVGNHTFGVALGLAFYLVGGLWSVILLGFITVALIAFVRRNNLRVFFRQNLRILNPTFGDYFMDVLTGGGLGDLFRKLILKDKRFDIKNPLLISLGFRRLLFNPYASHAKEYAPKKIPKLGKGV

SEQ ID NO: 11968 - protein, 350 aa, Methanobrevibacter gottschalkii
MKAFFTVTGRGLGGDAVVALNTMAALRKRGVECIIGLDKTASSDLFEKNGFEVCKISIPHAGGHSATKLSAIRGALKLVTATFKARSAIKKSKSDFVVAVLGGGAIVGSLGAKFARKPCFSLISTPLDSKVCPKFNYCYALPELDAFRFDTLPKNMDRSFYPLTDDIGDGKEEIALQKLKEYPNFDENKKTIIFSSGSSIFKGMIDAINIVANSTDEYNLVLIGRPLREEYYDLIDDEKIIYVGFIDWINHLFKFADLTILTDDGVSLEEAMICGKPIIALTKVKWGRYQNMAGVFKGAIIESEVKDVCKSIMKAFENYNSLKENAEVYGKQCFEAADVLADKILKKVEY

SEQ ID NO: 11969 - protein, 433 aa, Methanobrevibacter gottschalkii
MKNIVIGSGPAGRLASLQLGKLGEDVTLIEKNHIAGTCLNEGCMVVCALTDITKFIDANKRFNSHGFLKSQLEISYEKIVERIVETQEKLRKLNQIENESVGNRIIYGEANIGNNIVEVNNESFEYDNLLIATGARPFIPNIKGNEFGLTNKDILKIDDVPEKLNIIGGGIIAGEIANIYSTLGSEVNIFARNTFLKEITPNTKKYILENLMTDVNIYENINVVEVFKDKVLLENGEELDGIPFFATGRTPNSEIVKDIVELNHDKTIKVNEMMKTSVENIYAAGDVTGGYQLTPVARKEGITAARNMAGYSNKITYNCIPQSLSLNMEVSFVENEKSECNEEDKQTIAMPAIAGPSAFWNILNEDTGYSEIEFDKRNNKINRINSISPSSVSDVAYLSYIMRMNYDLNDYDEFLEIHPSTDTNYKIIKNMWL

SEQ ID NO: 11970 - protein, 90 aa, Methanobrevibacter gottschalkii
MCIAAPAHVVEINREDNWLYADFGGARQQAKMDLLPDVEIGDYVLIHAGYAIEKLTEEAAKESLEAWEELLEVLEEEDKEMEKARMADLD

SEQ ID NO: 11971 - protein, 167 aa, Methanobrevibacter gottschalkii
MWEKINEKFKKYPARIRVAEKMIELGLSLNEDGKIYCGNLKISDKALATAADVDRRAIKSTIEVIQEDEELYNLFSNIIPAGTLLKNIAKNLKLGVIEIEVGSESEGILANTANLITKKGIGIRQAYAEDTELQESPILTIITEEVVSGDLINEFLKIKGVTRVSIY

SEQ ID NO: 11972 - protein, 94 aa, Methanobrevibacter gottschalkii
MSEELVNNIKDAITVINDPHMGISIVEMGIVQNIKVDGDQAEITLKPTNPGCMSITRIAADAKVKAEAVDGIEKAKIIVEGHAMADSINEMINR

SEQ ID NO: 11973 - protein, 302 aa, Methanobrevibacter gottschalkii
MKVICSSEESLYRPEAVRWRQRMEMMEPLGDSVVLLPCSMKKPYSNSKSHQKFRKIARSYQELIVTSPFGICPRELENTFPIQSYDVSTTGSWSQDEIEETGKLIAKYCEGKNIVANLSGGYLESCESYVDDFINVCKDGRPTSPDSLYNLRMELKKHQKINRKEKTLHELRSIAKFQFGENGDKFIPDNVKTKGMYHKRILSDGKQLALLNKDHGLYRLNLSGGEILKELNTHIVEIDFDLTTNTVFAPGIIKADPKIVPNDEVIVVKDDAVVGVGKAIMTGHEMEECRNGISVKLKHRVK

SEQ ID NO: 11974 - protein, 225 aa, Methanobrevibacter gottschalkii
MIDDILVKKLLSQIVEKDHEENLKKNFRERYPDESTPDGIDNLIRALELPPEDVQYIANDIRETVEKTISPIIKSLIDGVETDEEIAEKTGIKLNIVRKILYKLYDLKIANYKRSKDPETQWFTYSWKFEESELINRIKSDSETELSELNAKLENEEHNMFFVCPYGHVRFNFDTAADPYYEFLCPACGEELEFQDNAEIIEKLKNNIEIAEDNYNSFIEKIDNS

SEQ ID NO: 11975 - protein, 399 aa, Methanobrevibacter gottschalkii
MNIPFSPPDISEKEIEEVVAALKSGWITTGPKTKEFEKKISAYCGSDKTVCLSAATTALEMTLRLLGIGEGDEVIVPAYTYTATCSVICHVGATPVMIDSQEYKEEMDYSKVSDAITEKTKVIMPVDIAGILCNYDKLYEIIESKKELFAASNGLQKAYGRIIVLADCAHGFGAVQNNKTAGTLADFTCFSFHAVKNLTTAEGGAVTWKEHEGIDSEKLYKQLQILSLHGQTKDALEKTKKGSWEYDILLPAYKCNMTDVQAGIGLGQLERYDSLLKRRHEIIKKYDEGFKNSKIICPEHFSENATSSGHLYLTRIKDINLEQRNEIMIKMDEKGISTNVHYKPLPMLTAYRNLGFDIEDYPNAYNLFKNEISLPIYSTLSDEEVEYIIENFLDILKEY

SEQ ID NO: 11976 - protein, 628 aa, Methanobrevibacter gottschalkii
MNVDSFGKYRNFLLPLMDSISVILGYYLISVLITDSFLMDPISAITRNEILISIILAIIILQTIFRLTKRYSNIIRYENNQDYIMYILLSIISLLIVSLIEDIIGMKNPSIKFNLTTGILIGTLTVVYRLVIRYALLSDIANKGINYTPENQEKVLIIGGGYSANNIIKTLQTSLKGKYNIIGIVDDNKKRIGYSVAGVKIIGNRKDILKICENEEIDTIFFTIVNIDNKNKKEILEICNKTSANVKVLPDLREIISSENLYGSLRDIEIEDLLGREPVELDNNNIKSLINNKVVLVTGGGGSIGEELCRQIMIHHPKQLLMLDIYENSLYNIELELKDNYPNDDIKAIIANIRDKERMFEIFEEYSPEIVFHAAAHKHVPLMENNPTEAIKNNVFGTYNLVNACDKYNTKRFILISTDKAVNPTNIMGATKRLCEMIIQAKDKESETEFVAVRFGNVLGSNGSVVPLFKKQIANGGPVTVTHKDITRFFMTIPEAVALVLQSITYAKGGEIFVLNMGEPVKIYDLAKSLIELSGLTLGKDIDITFTGLRPGEKLYEEILMDEENLEGTGHEKIFITEPMNFTMRDVEEKLDAFREIINKEITDKQIIKETMKKCVPTYKEPKEVNGE

SEQ ID NO: 11977 - protein, 287 aa, Methanobrevibacter gottschalkii
MTSSNELKNIKHIINGDYIIIPIETGYIKPNESLDVIIKPAKELMKDNDYLVIAETPVSVSQGRLIDESKYSPSLTAKFLTTVWSKYLWGYILGPALGIKKRTIRNLRKLPKETYAHKELILQLYGLKHALKPASEAGVDLSNAPGTYVSLLPDNPEEVTKDLKKRIGKDVCVMIIDTDATYMKNGKYFTGLPIAIEGIDADNGFFGYVKGQLSENMGSTPLGCSEKLDVETALKIANIAEDYQKSLSTEMKTIHSVKDVLGTEFDEVTIEDLDSIIHTPAVIIRKI

SEQ ID NO: 11978 - protein, 189 aa, Methanobrevibacter gottschalkii
MARKFITYFDKEGNDYTDELIMAIKDKLDITDIKRVIIASASGESALKLYEAIGDEVEIINVTHHVGFSGSNESDISKGMIKKLEKVGIKTYFGSHAFSGAARGVTNKFGGYSPLDIVANTFRMFSHGIKVGVEISIMATDAGLIPAGEEIIAVGGRGHGVDSAVILTPVNSKDLFDLKIHEIIAMPRD

SEQ ID NO: 11979 - protein, 378 aa, Methanobrevibacter gottschalkii
MKFIDDAIKESEQRMEEKVPDKLSSDIDDDLIEMIKGAKTNIFVVGAGGAGNNTISRLNEMGIEGATTIAVNTDAQDLFYSQSAKKILLGRKTSKGLGAGGEPAVGEECAEESEDEIREELEGADMVFVTCGLGGGTGTGSAPIISKLSKKLGALTVAVATMPFSAEGIKRRENAEQGLEKLQESADTVIVIPNDKLLEVAPNLPLNKAFMVSDEILGRAVKGITELITKKGLVSLDFADIRSIMGGSGMAMIGMGESDTGDRALESVHEALSSPLLDIDISNATGALVNISGSSDLTLHEAEKIVQVVADKLDPEANIIWGTQIDESLQNTVRTTVVVSGIKTGYEEDNSPEIEYAEDNSENKSADDQLDDFIDGIF

SEQ ID NO: 11980 - protein, 59 aa, Methanobrevibacter gottschalkii
MNVQENFNKFIKDSKRVLKVAKKPDGAEYRELAKISVLGVAVIGVVGFVIVLLGSLIGL

SEQ ID NO: 11981 - protein, 156 aa, Methanobrevibacter gottschalkii
MEDTNSSIYALKTSAGQERNVARLLARKARTIDGIGISSILVPESLKGYILVESSTKIDLRNPDLKVQHLRGVVGGDATITFEEVKRFLKPEPIISSIQKGSIVELISGPFKGERAKVVRIDESREEVVLELIEAAVPIPVTVKADQIRIIQKEAD

SEQ ID NO: 11982 - protein, 159 aa, Methanobrevibacter gottschalkii
MAKDTVEVLIEGGTATPGPPLGPALGPLGINMMQVVEEINKKSADFAGMKVPVKVIVDRDTKDFEIEIGTPPTTALIMEELGIEKASHEPGLDIVNDLPIEAAFKITRMKFDSLLANDYKSGIKEVMGTCVSMGLSVDGKDPREAQKDVDAGKYDDILL

SEQ ID NO: 11983 - protein, 212 aa, Methanobrevibacter gottschalkii
MTQDVINAVKEAKEQSKPRNFTESVDIIINIRDLDVKKPENRFNEEVTLPNGRGKDVKIGVIADGELIVQAKDAGLDTVINKGDLEAFGKDRKSAKKMANSVDFLVAQADMMPLVGRFLGPVLGPRGKMPKPVPASIKLAPLLERLQNTVKVGVKQQPSIQIVVGSQDMSDEDIAENVETVLTVLDRNLEKGRSQIKSMFIKTTMGPVVRVI

SEQ ID NO: 11984 - protein, 334 aa, Methanobrevibacter gottschalkii
MAHVAEWKKEEVQEIKEIINQHEVIGIVDLMNIPAKQLQEMRKSLNGKAVIRMSKINLIDLALEDCNADKNNIVDLSEHMEGQVALIATEMNPFKLYKILEDSKTSAPAKPGTIASDDIIVPEGDTGFEPGPFLGELQQVGIPAKIDKGKICVQKETVVVKAGEEVSKQVAATLSRMDINPMEVGIDLKAVYEDEAIYTSDILAIDEEQTLADVQNAFRNAFNLSVNAAIPTDETISTIITLAYTRAINVGVAGAIMTSETAEPILGLAQAKMLAIASEVADAPGAIDDELAEKLSNVAVAAAPVIEEVVEEEEEEEEESSEEEAAAGLGALFG

SEQ ID NO: 11985 - protein, 100 aa, Methanobrevibacter gottschalkii
MEYIYAAMILHSAEKEINEENVKSIIEAAGIEAEDARIKALIAALEDVDIDEAMETTAMAAAAPAAAPAAAEAAEEEEEEEEEEEASEEEAAAGLGALFG

SEQ ID NO: 11986 - protein, 900 aa, Methanobrevibacter gottschalkii
MINMVEIFEKLGYKLQTCKTCGQEFYSQVDRDTCGDAPCDEYGFIANPATDKPYNLYEIQKVFKEFLESEGHTAIDRYPVLAKRWRDDVFLVGASIFCFQPWITSGLVKPPANPLEIAQPSIRLNDVDNVGRTGRHMTCFTMGSHTVINTEDDFIYWEDETIRLCHEFFKSIGINTEEITFIKSWWSGGGNEGPCYEVCCRGVELATLVFIQYETLDDGSKKEIPIKVVDTGYGLERIAWISQGTPTAYDACFAPVVDKLMELTGVEINEDIQGKNAQIAGMMDIEDIGDLKDLRQQVADSLGLSLNDYLEIAEPMEAIYIIADHTRCLAFMIADGIIPSNVKEGYLARLVLRRTIRFMKDLNMKESLADIMAIQLDFLSKFYPEIRDSEQHIMNIISLEEERYSATVKKGKSIVKRSIKRLKKEGKNEMPLNLLIDLYDAHGIPPETVVEIAGDDFVVNVPDNFFTQVAGAHEKDNSSKKSTFKVDFPETELLFYKYFYQQEFEAEVLGVLEKDGKQCLIFDKTIFYPEGGGQPSDMGEISIDGNVLKVSHAEKVDDVVLHHVDEVSQDIVGKTILGKIDWDRRITLARHHTGTHLVIAAARKVLGQHIWQAGSQNGLTRARIDLSHYRRITQEELNEIEKLANEYVMENIDLDIQFHTRDEAQELYGFVLYQGGIVPGKMIRVVKIPGVDVQACAGTHVLRTGVVGPIKINKTERVQDGVERIDFSAGLAAIDSMQHDNELLRESSSIFKVDNEQLPKTCDRFFSEWKAQKNEIDRLKTQIASLKMNSLAEDYEEINGLKVVSELMEADFKELQKIATDFTDNGKADVVIMGNNDGKIVGAASQNAIDNGIKINNVIKSAASILGGGGGGRLTLAQGAGKNTDKMNEAIQTAIGLIKG

SEQ ID NO: 11987 - protein, 1018 aa, Methanobrevibacter gottschalkii
MKLKNKILVLLLFLVLICCLGAVSAAEDINETITADSSIDDVNTVSVEDAVDETVSDDSDSDKGIVENQDVEKTTMLTDRGVNVNAATWSKLSQYAGVIGTDYIITLTGDSYATDSQIKFNNGATIIGSPNNYITTGSYTKTPFLNTNSALTITFINVTFKNMNVDYLLSLAGTNVLENCNFYNITAGTGHNAVIYNTDGTMNLTNCNVINSSAGYGVVSNYKSGTYTGVVMNVNHCTFINNSASVEPGAINNCGILNVDNSEFINNTATWWAGAIHTHYNAQTIINNSLFEGNVAGWNGGALYTYSTLKVYNSIFKRNKCHTNIGGGAIGASRWWSGNYDITIVNCTFEENENCNTNGNGGAITALNSGALNVHDSTFIANVAKNGQAISAFSQAFENITAGIPNLKVYNNTFYNHTLTTSDTVEISGNYTFENNTFINCYQTNLGTNNVFINPVTLNNNNLILKSNKEHLLMSNLSENILKNAPNVIYVDSNSDKDCDEDPNIDGHNWETAYGGIFALSSAIFNICDGGKIYLADGEYSYRTNGAITHPKNLTIIGQGANTIVDLISCGEETTYTCIFINLTVSGKDYGRNTNFINCTFIKPISISADINLNSVLKEHAVENGYANTYLINFDNCVFKDVVDDRIITLFEYGALNFTDCVFENITADSIVYRNSTGYFEDDSISFRNCTFSNCKFNGVVDSKTNFDDAIVIEDCTYDGDVALGTTEVDGHFYVNATKLKVVAVATNMSISSSQRGVVVITLRDAEGNAVSGVNVSYTVNGVNMSGVSDANGTITISDLTDEVTVSANFTGSESYLASNNTASFNFTIPKVSTKLYVSSVTTFYNAGKYLTATLKDSNGEVLANQKVTIKINGKTYNKITNAKGQATLKISTLLPKKYTATVNYAGDDTHIKSSANAKVIVKKATLKLTAKAKTFKKSLKTKKYTITLKNNVGKVMKKTKVTLKIKGKTYKAYTNSKGIATFKITKLTKKGKYNAYIKFAGSKYYNSLNKKVKITLK

SEQ ID NO: 11988 - protein, 384 aa, Methanobrevibacter gottschalkii
MNYDLIIARYGEIGVKSPKIRSRFERKLVKNIKATFDCEVDRNQGRIYIHPKDFEDGVKKLNRVFGVVSYSPATSTTATYEGIDETLTKYVGDLISEDLIDENTKFAIKCRRVGKHDFSSQEMAAHCGGVVRNVVLAPVDLTNPDLTIFVEIRDNNAFIFHEKIKGPGGLPLGTQGKVVALLSSGIDSPVAAYLMMKRGCEVIALNCDNSPFTTPKASELFDALVDQLNIYAKGSPIKKRVVHYGEYLQAAKDKAPEKMTCVLCKSGMYHIAEKLALKLGADAIVDGSSVGQVASQTLSNILATRYGVDMPILSPLIGLDKEEITQIAKKIGTFEISKIDDGGCSAVPRYPETQADLERVKLACEDMNQDEEIEKAFRNIVRFD

SEQ ID NO: 11989 - protein, 364 aa, Methanobrevibacter gottschalkii
MKTTVSVIKADIGSVSGHCVAHPELIDICDEVLNEALEAGIIKDYYISRCGDDIDLIMTHDKGEENEEVHKTAYTAFMKATERARELKLYGAGQDLLTDTFSGNIKGMGPGVAEIEFEERPSDPVLVFCCDKTEPGAFNLPVFRIFADPFNTAGLVIDPKLHDGFKFEVFDVIEHKKVILNCPEEMYDLLALIGSTGRYVIKRVWKKNGEIAAAVSTERLNLMAGEYVGKDDPVCIVRAQSGFPANGECVDPFAFPHIVSGWMRGSHNGPMMPVSEAEANPIRFDGPPRVVGLGFQVSNGELIGPVDLFDDPAFDPTREQAAKIATYLRRHGPFEPHRLPAEEMEYTSLPGVMKKLESRFEDMD

SEQ ID NO: 11990 - protein, 91 aa, Methanobrevibacter gottschalkii
MPQNEMRKSGVKMHKTYLLENIDEIHTTEMGIGRVQKNLQITSEPVSYCISKLKQEDSKVTKKGKNYYVKADNCIITINSSSFTIITAHKN

SEQ ID NO: 11991 - protein, 369 aa, Methanobrevibacter gottschalkii
MSFLKFILKNPFRRKNSAILAIVGIAIGIVVIVSLGGITDGLINTFEDTIHAGGADFSISGKETGNSAYGTNTIDSSWTEKIAKVPGVDEAYPIYVVLTSVGDDYMNTLIGIDPEGSELADISMKEGRIFEDNTSEVILGEIYAEDNNYSVGDSIIINGEDFKVSGIYETGDQNMAGGVFTSISKIGELMDDKDSISNIYVKVNKGEDAQAVADRIDTKYGDNITTVTSVMEMTQMADMLNMLQASTWAISLLAIVVGGLGIINTMLMSVFERTREIGVLKAVGWSNKKILTMIVGESLVITIVSAIIGSLIGFLACTLLGPQMGINPLFTPKIFIQAFSIAIIVGVVGGLYPAIKAVKLPPTEALRYE

SEQ ID NO: 11992 - protein, 232 aa, Methanobrevibacter gottschalkii
MNAVEIKELYKSYEGGKIKALNGINLTIKQGEFVSIIGPSGSGKSTLLNMLGALDIPDSGTINVNGHDLKTSKKLNEFRSKKIGFIFQLHNLIPNISVVENVEIPMYTQKLSSKEMRFRALKLLDDVGLSEKSKILPNKLSGGERQRVAIARALANNPSIILADEPTGSLDSKTSSKILKQLIDLHEDKNVTLIIVTHDMDVAKLADRVIEVLDGEIISAGDDSLINSKIDV

SEQ ID NO: 11993 - protein, 80 aa, Methanobrevibacter gottschalkii
MTELESPEKIAKDILKLERNLNQVADITFKGKEKEVYDRAIDYWNDSKYYLEKKDMRTAFGCIEYSHGLLDALRMIHGII

SEQ ID NO: 11994 - protein, 189 aa, Methanobrevibacter gottschalkii
MLQSLRPLLTRILNPIAKRLNINPNIVTIISPFVALLAAYGFANKLLILGTIAILLSGFLDVVDGAVARYHEKSSKFGAFLDSTMDRFADAIIYIGIIFGGYCDWLVGILAIHSAICVSYVRARAESQEVDCNIGIAERAVRMIILMIGAIIGYFAGDIYFTYIIYILVILSYFTVGQRILHVWRQLND

SEQ ID NO: 11995 - protein, 193 aa, Methanobrevibacter gottschalkii
MKVLKTSIDCVDERIINEAVNVLANGGVVLYPTDTVYGLGANIFDNKAVKKVYGIKQRSLLKPFSILVKDIESINLVAKVSSAQKNLFNKYLPGPYTFILNKRNIVPRVVTSGLANVGVRVPDCDIACNLAKIFPITTTSANVSDDEMLSNPREILEQLDCDVDLVIDVGDLDSNVPSSIIDLSGFKPKIIRK

SEQ ID NO: 11996 - protein, 234 aa, Methanobrevibacter gottschalkii
MKVLANFEDNHKIPSNSALDVMLAGGFEKGTITQIFGPPSSGKSNITLSVAVNVAKFNKKVIYIDTEGGISIDRIKQIAGVDFSNVANNIIVFEPTSFLEQNDAVKSIDAWLRSNHNDVDLIVLDSAVALYRVDDMKSSKLNKELGKQMGLLSKIARQYDVAIILTNQIYSSYDDEGNNDIKAVGGTILQYWSKVIIQLERGEEINQRIATLKRHRSIPEGKQVTFSITSKGII

SEQ ID NO: 11997 - protein, 389 aa, Methanobrevibacter gottschalkii
MRTDFDIKNPKKKFKKTERVPPKGYDNANDFFEDMYMDENMIWMGQNTNHLHDDTIANAMIDAIRMKTYCRYPAPEGFSELKKLVLKDLGFEDEEVLLTSGATESLYLCMQALLTPEDNVILSDPGYFIIGDFANRFANEVRYVPIYDEKYGYKLTPDLLRENMDENTRMAILIDPLNPLGSSYTEDELKEFAEIAKENDIYLLHDVTYKDFAREHFLVENYAPGQTLTIYSFSKIFGMAGLRIGGVVSSKPIIDAIKNAVVNDLGVNIISQYGAIAGLKSKDVWFEDMRQTCFENQRLIKEMVDTVDGIFLPVYPSDANMMVIDIYDTGINPKDLSNYLIQKGLFTREGEYTSDEFGERYLRVSFSIPTEEIKIFCEEFPKAIEALRK

SEQ ID NO: 11998 - protein, 244 aa, Methanobrevibacter gottschalkii
MINMDFKGFRYHKPLPNFYKTDNPLTPKREISDDLLLKLDNLAKKYNFTGISYSKLSDDFKKDFNIDFDNVIIFRFLMKNELIKMESSPEKSKLMDMEFQVYGIHIYEFADFLRENGFQADLLHPFDDDLSLKSIAMQSGDCIITRSNICLFKEGLHNGFFMIHTSIDNLPFKNENDMLWVKDFCSTCGVCIERCPNDAFDYEENLLRKFCTAHREGCSECILICPFFKRGYDKVKRRYDGMKK

SEQ ID NO: 11999 - protein, 125 aa, Methanobrevibacter gottschalkii
MNDKIALVSCSGLSPLGLVVRAASVELALENENIVAACITEYSAQPNNCSPILDDAKIVTITGCGDDCASVILKDKNIAAVKNISLDHVVKAYELNPLDAVRLDEDGEKAVVVLKKYILKELENI

SEQ ID NO: 12000 - protein, 592 aa, Methanobrevibacter gottschalkii
MTRISILDKDRCQPKKCDYLCINYCPGVRMDEDTIIIDEDTKKPLISEELCEGCGICTNRCPFDAITIINLPEAVGEPIHRFGQNQFELFGLPTLEEGTVLGLLGQNGIGKSTIMNILSGNLIPNFGDFENKPENWDEVIEFYKGSSLQKYFRDLSEGNIKTILKPQMVDQLPKVVKGKVKDLLTNVNERDKLDYVTQELQLENVLERKMENLSGGELQRVAIAATVLREGDFYYFDEPTSWLDVSQRLNAVKVIRSLADEGKSVLVIEHDLATLDALSDNINILYGQPGGYGVVSGRKGVRLGINAYINGFLNEENVRIRKNPIEFTIRPPTPEDEGDVLASYSDLKKEYDGFRLSADAGEIFYDEIITAFGSNGIGKTTFAKMLAGVEEPTNGEIDEEVTIAYKPQYIVSNFEGTVSDFLYMNAPSFGSKIFDSEIMKPLTLDEMLDKPVNGLSGGELQRLAIAATLSKDAEIYLFDEPTAFLDVEQRLIAARVIRKMVESRNAASLIVDHDIVFIDYISDRAMVFNGTPGLNGHASKPTDLRNAMNEFLGNLNITFRRDKETKRPRVNKLDSYKDREQKEKGEYYYLSD

SEQ ID NO: 12001 - protein, 112 aa, Methanobrevibacter gottschalkii
MKQVMIVRTDLKMGKGKMAAQCCHGSIGSYKKASPDKIKKWENEAYAKVVLKVKTLEELTELKKMADINKVPNYLVVDAGRTQIPTSSVTVLAIGPDEDEIIDKITGNLKLL

SEQ ID NO: 12002 - protein, 220 aa, Methanobrevibacter gottschalkii
MSIKQVVKIGGSLFPDYAIDLARHLKNTDSLIILGGGEFANLIRKYDSEINFSQKTSHWTAIDCMDIIAKLVNDKVESTKLAYSIDEVQKISDEGFTPIFVVSGFLRCEDPFECSWNVTSDSIAAYISHLLNANLLIVTNVNGIYTHEPKESGSTFISKIDAKTLLNFQESSIDVMLPSLLLKFGTDCYVVNGKYPERVLSLIDDNINDYNFDYTQIIGD

SEQ ID NO: 12003 - protein, 53 aa, Methanobrevibacter gottschalkii
MKTVECISCKQEIPLTGTFVEFKCPICGAKIARCEKCRTFGHAYKCECGFEGP

SEQ ID NO: 12004 - protein, 89 aa, Methanobrevibacter gottschalkii
MGEVLTTMKIMPDSPDIDLDAIKSTIENSMPESAKLHDMAEEPIAFGLVAIILQFITDDGEGGSEPVEDMVQSIEGVASIEITGVGRLM

SEQ ID NO: 12005 - protein, 242 aa, Methanobrevibacter gottschalkii
MGNIMDRTKKIIIALIIIVLIILVGIIASVWFIGHDVDLDEGSKTILVCAIDESEDRPGMGACDMAFLVHLENGAIKNYTPVYPGGMTHPTAQEPAEAQSQGAGSDLLLHDAFWDVDNSKGMNLAKEIVEYRTGSSVDSVVAINTKALDAILSAAAPLEVNGKIINGSGIDFIREDGSNGVSRGDAVMEIVKATANSAKDPVKKSAMINAAVDQYSKGNIIMDQQGSFVDLLASKGIETFFN

SEQ ID NO: 12006 - protein, 355 aa, Methanobrevibacter gottschalkii
MYKKILVPTDGSEASFKEVISASNLLAEDGEIIVLSVAKQLKQHPLQIKKDIKKTNETFIEYAKENVEEMKKKFDSNIKVSTKVVVGFPAEAICDVAEKEGVELIVISSAGERGFSKRIIGSVAGKVCSISNINVLLISNEEKELIKHSTTKKSDNKNKINRDYTRFRNDLYVLLRFISVEKRLNSDYPEEIIDSIERRIKYLDLIYKTLNTHSESEYVNVKEYFKKYSANFYSLYKNKQPGIEFVNKSEDNFNIPDNIITPLTAIINELIVNSLKFAYEDYDVEKKIITEKVTKNKDICEVFYKDNGKGLPDDFDKDNPTGLGWTIINALVKQLDGEVKAYNSDGMCFEMKFKL

SEQ ID NO: 12007 - protein, 304 aa, Methanobrevibacter gottschalkii
MINIIEEFFIAIGGISLFLIDFFKNFSLKEIEIEKTKDINQNIAQKLNLQKDIKLQNNEKDSIDKIRRLIIPYLTNKKIIGLLGLLFLLINLFISLEISGIYIVLVLMTYIFVFYYPQIQQQRNYSDINQELPYALRHIGIELKSGKGLHDTLRTIKNADYGSISQEFNRILEEIKFGKSTEESLLEMSTRVKSEGLTRAIHQIISTLRVGGNLSNSLDIIAKDISFDMQIKLKEYSQKLNSFILIYTFIAILTPVISLIMLMASSTVMGDILSSSLLFILYGVFFPSIVVFMGVFIKKLEPKI

SEQ ID NO: 12008 - protein, 472 aa, Methanobrevibacter gottschalkii
MNNNGIIPQYDIIKQEYTSEEKILLGEIRENLVDLAISTGENFQVNETKLINNIKNFLFERLNDNQQNNNGTNEYLDNLSRKLLRDIVGYGEIDPLIQDDELEEIMIIGINKPVFVYHRKYGMMKTNITFNDEQELIDLIDAIARQINRRIDQESPILDGRLIDGSRINATIPPISADGPSLTIRKFKKDPLTIIDLIKSKTISVELAAFFWLCFDGLGIKSANAIISGGTSSGKTTTLNALSAFINPKERIITIEDTLELQIPHEHVIRMETRPSNVENKGELTMNDLVKNSLRQRPDRIIVGEVRAEEAITLFTALNTGHSGFGTLHSNDARETITRLTNEPMSVPKIMIQAIDFIIMQNRIYTSSGVSFRRISEVAEVVGIEEGVVQLNKIFQWNPETDTIDNVSISSKTISQIANLSGKSLNELYHEIEKRELVLKHMVNYNIRSVDDVTAIIELYYKNPEKVLNNII

SEQ ID NO: 12009 - protein, 298 aa, Methanobrevibacter gottschalkii
MIDLNEQIKALDYCENCNDIQIKKFSPLKDLIDFDELNGEYMKCECGKRPLDIVMSHILKIMIEEKIVPENASLRRNSPVPLSNFYYSNLNPQFIGEGTLILLHPDFTSNVALKLFNEVQEVRCVLKGSPQSHIGQFDRNSQINHFEILIGDDEQINVMRTLLGDKIVLVKNQSKHHIEVAMTTEEKLLKLHNYLDNNKINKCVAIDGMCGLGALGIYLLKYGFKKVIFNDINPEMIENLNKNLIFNNISEGFEIFNESFENLDVGHVDLCVIDAFPGADTSEIVKKAEKIADDVLII

SEQ ID NO: 12010 - protein, 417 aa, Methanobrevibacter gottschalkii
MIEIVIACFIGILIGTTTGLIPGIHVNTAGAILFASSGLLLTQFSPEFLCVLMVSMSVAHALIEFIPSMLLGVPQEGTATSILPGHRMVLEGRSKEVIRIVAVGGFGAIIVTILMLPIFSIILPILHDILKPYTWIILLAASLYLTYRLTVNFRDFLWSLLLFILSGILGWTLFQSPITSGVTLMCTFSGLFGISTILFSLNDSSTMPHQNPFYELNIDYDKLKSIFTGGITGAILGFLPGFGPAQGTVIAQAVSGTNDNRNDDTVNFLLATSGLNISDCLFSLIAIYIIGNPRSGIAVYMSYLISEMNINHLIIFIFASLLAVSVSLILALKLGDSFSRLMGIVNYKKLSISVILLQIIILYIFIFYYKSPTCYMTLALITSTALGMLPHYIGVGKSHLMGVLIIPAIVIYMKMFI

SEQ ID NO: 12011 - protein, 154 aa, Methanobrevibacter gottschalkii
MIEYDDIIKDSPFLANHLITLNKTHDFYINKHIKSGTDILPSQYYMLMFLYYEMGTTQSDIAKACLMDRSGVSRAFKDFEKKGLIKRKVDNDNKRAYKIKLTQKGIETAEFLIKKEKEWDNMICEQLYISREDLLKLLSKISLKSLEFNRNQFQ

SEQ ID NO: 12012 - protein, 165 aa, Methanobrevibacter gottschalkii
MNKKEIIIILIFIGFCFVFAGPVFAKEKVKVNVSIDDHPLNNKGFIVIKLVDSRGKDIESNGTIHYKITDEFGNYKWAYKSYDGEIRLKYTAGIYKVDVKFDGDFHYNSAIKNKSVIVKTEKFNPYTYYDNHNWGLNQEIDDYIEYNYWDEDIYDDPTNYDGEGP

SEQ ID NO: 12013 - protein, 672 aa, Methanobrevibacter gottschalkii
MKKLIVGLAGNPNVGKTTVFNQLTGMRQHVGNWPGKTVERAEGHFTHGNYEYDVVDLPGNYALSAHSMEEIVSRDFIVDDDSDVIVNVVDAANLERNLYLTVQMMELGANLVLALNMNDFAKKKDHIIDIDLMSELLGFSVVEINAKNKDGFDVLLSAVEKAASKPKNTSAKLSYGDELKEHLGDLQELIERDNKLLDVPSIWTAIKLLEKDSIVIQKVQQSSISSQIMAETDKVAGHLHTIYKEGAEEVVANARYAFIDGLMAEAVKRPAVEKETITDKIDKIVTNRILAPFIFIILMWAMFQLTFTVGAPFQDMIDQAFGMLSEWVATFLGDGLLSSFVCDGIIGGVGGVLTFLPIIILMFLFLSILEDCGYLARAAFTLDKIMHKIVGLHGKAFIPMILGFGCGVPAIMATRTMENEGDRMLAMMLVPFMSCTARLPIYAIFVAAFFADNGGNVLLAIYLLGIVVALIVAAILKRTMFKGLSTPFVMELPTYKVPSLKGVLLHTWEKVKGFLRKAGTIILACSIVLWILQNIFPYGGSDPQMSLLGMIGTAIAPIFAPLGFGTWQAAVAIIAGLAAKEVVVATFGTLAGMEEDDEEGITNLIHDTFTPLSAFSFMAFTLLYTPCFAAIGAIKQETNSYKWALTMCAITLVTAFIVSFLIYNIGLLAGFG

SEQ ID NO: 12014 - protein, 75 aa, Methanobrevibacter gottschalkii
MKTLKDAKPGETVTLVKYHDTGDLDLRRHLLGMGFIKGAKITLKKVATLGDPIEMNVKGYDVCLRKEEAENIEVM

SEQ ID NO: 12015 - protein, 68 aa, Methanobrevibacter gottschalkii
MKCRMCGFEFDENELENRGCSSCGKHNCNQVHCPNCGFGNSPELGQEFEFITKLKNRFNKNESENGSI

SEQ ID NO: 12016 - protein, 280 aa, Methanobrevibacter gottschalkii
MEKIHLETKNLSFTYPDGTKALKNVNIQIKKGEKIAIMGPNGAGKSTLFSHFNGLTEPTSGHVEIDGEKIIFNREELLKVRQKVGIVFQDPNDQLFAPTVKEDVAFGPMNLGLDYDEVKNRIAESLKMVGMSGFEDKTPHHLSGGQQKRIAIAGIVAMKPEIMILDEPTAGLDPEGVDKVLNILNNLNNEGMSIVISSHDIEMVNHFADKIFILYNGEIIAKGNKHQIFSNKELLKKAHLKAPTTTEILYKLKENGLDVNTEKITVDETVEEILNIERIK

SEQ ID NO: 12017 - protein, 276 aa, Methanobrevibacter gottschalkii
MVDITQIMRFDELSSQNSPIHNLEGRIKLITTIFIILVSVISKELFIPIILEIILLNILKIADLSYINSAKRLLMLLPFGGAIIVFQPFIQPGNIIWSYSWLHITDFGLNWAILLLVRMIVCLTAIIIYSSTTPLQEMASSFRKLKMPRDLAMILSIMVRFLFLFVDELAAIRKSQKSRNFNIHSKNTTYKWRVKQVGYTIGMMFLKSYEQGERVHKSMVSRGFSDTSEMFDEKKSPEKSDYIFIISIIIVVIILEIIMFKYSGQLGYFGQNLSIN

SEQ ID NO: 12018 - protein, 101 aa, Methanobrevibacter gottschalkii
MDKKDMSLIIVAVVICIVISCLSPYIASGDPDGLEKSAEDASVPEDFQIEPINGIPDAIFPDYAFASAPDNQGLQIVALIIGAILTLGVGYGVATILKSRN

SEQ ID NO: 12019 - protein, 212 aa, Methanobrevibacter gottschalkii
MHIPDGFIPIAQCLVYYVILIVALYFSVKWAKSNLDEKRIPLLAVLAAGIFAIMSMNMPIPFGTSGHMVGGALVAIVFLAPEAAVLVFTVVLLIQALIFGDGGITALGANVLNMAIVGGFVGLYTFKTLNGKIGKYPAAGIAAWLATVLAALACAIEMGIAGTFPVNVGIPSMVLYHFFIGIIEAILTVIVLVALDKFRPDLLSWNKTEGSA

SEQ ID NO: 12020 - protein, 424 aa, Methanobrevibacter gottschalkii
MSIIYSKITSVINKISDEIHRSFLFTTIFSILRFIELQWINSYFKELYPNEKFLNFLNNSILKKNLFNPLIVLLLFSFFLILSIKSPSKSLVITLIVGFIAFFIGSTILPKYFLNNNIRIIEFNKKDIYSIGFCLILVSIIFFGICIASVGGIPLLKPSIRYLLKPIFTMPVFLIIPGTCLVASAYLKDFQMKNITRSQARFRFIFLLAIDTALLLLLGYRTPLVAAFLIIIIIGFYGNIISLWEVIISGLIGIGAIIGIGYFRSLSEMTITSSTNPFYTLQSRADFTLHVLNLLDFVGGNAGLTHGHLLTSSIPGSDLGPRMLIGKIIAWRTEVTVTPTLIGQMVVDFGKIGVAVEMCILGFILGIGFKIMQKTKNYFYIAIYSLILTYSILGIETGILDIQVLFYFATAIFIYLINIKKSQQ

SEQ ID NO: 12021 - protein, 257 aa, Methanobrevibacter gottschalkii
MKIKFTLIDYLIIILVVCAISFAFIHITTDNSSEVQKTVFDASTINKIPDTYFNYYRDGYIVGTTVDGFNASTGEKITLNGTIKWIGNNGGTDVKILVESDNTTYLVGLYKSIPEADIYIDKISLETNGSTYPNLVEIKASPENISTINDLNKNLSNSDFEISTIISLDSLDLVKIQEIANKINSHDKRMAIKTPSSGLGNSLILENANKQTLDDANSVLGNINGLTDELTIRIYNCSDSQLEQVKNSYNITNIRTF

SEQ ID NO: 12022 - protein, 51 aa, Methanobrevibacter gottschalkii
MEECGVCEDCIDVCVEEAIERKAYTVTIDPEKCDNCGECVDVCPVGAIYEE

SEQ ID NO: 12023 - protein, 186 aa, Methanobrevibacter gottschalkii
MIKIATAECFTHGKIGRELHALAQNYEGNFGMEYIQNSKQYGNFDYNELNVTCSLFIPTLEAVKKILNVKNPPKPDTLIKGIKVYNEEKDKTVSKIMAKAVKELSDCDIAIGTSAGIGRGGITILTNNFEITTTTDIYADLTDNNSSDLFKRSESGIKKTLEIILLLLNNNFDRINSLENVEIIKK

SEQ ID NO: 12024 - protein, 216 aa, Methanobrevibacter gottschalkii
MIDEIQKMEDLQVPKGRIDLIGCGRLGLRIAINLIQIHRGGPKVIGAFDGQKISDGDIIFKLYGAELDESKPDFIKRLCTHDKEFRKIEVHNEYINDDNLDLITGDVIIIVIAGGNTIPTASKIIKHAQKKGAKTISTAGIFGFGNEHIEIKDISEYDNNNPAIEELRAQGVTENHLVLTTNKLIRDNEPVTPYTLDEVAKLITICSLKLLKDQND

SEQ ID NO: 12025 - protein, 231 aa, Methanobrevibacter gottschalkii
MKLKEIISFINERIPEDLALKHDNVGLNGEYDLNQEITSIKIFMDLLPDDDNGENTLIITHHPPLFIPKTPTYTIHSNWDVIKGGSNDILAKTLKLDVIDVLDEKTNIGRICKTDYSFNQLKKIILDKYENVRIVTQLNDDYILNKIGTISGFGLKNSKYVKLAKEKELDILISGDLTQETAILGKNLSITLIDLGHHESEVPGLYQLANLLKEININIEVIDKTPIKVIK

SEQ ID NO: 12026 - protein, 265 aa, Methanobrevibacter gottschalkii
MNIDTGITSEVFTIKSQIRLLDIFNEIINKKSQIVYEYLKSLNLDNNVKIIVIGTYFTGLGIVKKLSEKYNNIILVDIYPHLEQLLYTKIGGELKNNIKFSSDLNLIYNGDVVIDTTGFGGINVEQSSKFNVNTFIIEDPIAENNDILLKHKNNILNRINVVNSQNKAIIKTKGINTKTSGTMSLTMRILTNALDNCLKKEGVLYSACEMGFFEEIIFKEKNIDKFIELTNMPAIKVSTIKPFNCNEIINRELDKITSKMILNET

SEQ ID NO: 12027 - protein, 161 aa, Methanobrevibacter gottschalkii
MAFEKMIHDAFEESRNNSRLGDTTDEINEIKEYIKNAKKIYVPNKNGIKVKVLNEVLNKYGLPEAEILQINTSTADTSRIPALAKAYMALDQSDADLIIARGRLGIPGSGSLLIFIDNKGRILTCGTSPSHPIHKKSLEQAVYEEACEALEKIGFDKRLKK

SEQ ID NO: 12028 - protein, 332 aa, Methanobrevibacter gottschalkii
MIDDILNKAKLGKKLTDEEYLELLKIDNNDYLEKLFSIACYIRNSQSKEIKLTSTVHITNKCQIQPRCEYCGFAEKTSRTGYYDAFYKSNEEILNAIVSIQKAHIPRVSCSGGYGYKGRQAVNACKIVKENSNLEILINVGGDLTEKSVEELAKLGVDTVCCNLETINEDIFNERKPGDSLKQRILTCRRVSSAGIGLSSGLLLGIGESVEDRLKHLRYLSSFKTLEEIPIMGFNPYPDTAMADYPSFPLKEQLKIVAITRIMYPSIRITMPTPTVGPENVEFSLKAGANNLATVIADNYPLEVKGVGSPEYGNYTEVINVIEKLGLIPQTI

SEQ ID NO: 12029 - protein, 337 aa, Methanobrevibacter gottschalkii
MKVAILGAGCYRTHAASGITNFTRACEVAEATGKENISMTHSTIEMGAELLELAGVDEVVVSDPTFDGEFTVVDDFDYAEVIAAHKAGNPEEVMPAIRAKVAELAETVPKPSKGAIHFTHPEDLGMKVTTDDSEAVADADWVMTWLPEGGMQPDIIKNFADDIKEGAIVTHACTIPTTGLNKIFEDLGTNVNVASYHPGAVPEMKGQVYIAEGFADQDSINTLMDLGKKARGSAFTLPANMIGPVCDMCSAVTAITYAGILAYRDTVTQILGAPAGFAQSMANEALTQVTALMQNEGIDKMDDALNPAALLGTADSMNFGSLAEIVPTVLDYLGKDE

SEQ ID NO: 12030 - protein, 498 aa, Methanobrevibacter gottschalkii
MYDLIKEAVHSDEAAIEISKMKKDVGSVVDAISELSLDDTMKLGMSFKRFPLGCDLTEVVVGTCASDLELMDLLGNCRLSDMIGAPIHICAYAFSDIGEKFGMTGFEVMKKVHEIVDVPLDLDHFGENGAMRLPKNITGCGGECYSKGPSFTECPRGRIHERLIDKEFEQKEDKENWVKLSSSVAVNVSSEQTGDAHAAPLSEAKDIAVLAKKYGKGLESIMFVGDGYDEVITGFEKSIDLGADVIVVEGGPFNRCENTTESFAKTIAAARILSPGKVVATNGAYEHELRMGLRSGLNMVITGFPKNHHGYMCGYEPGTARRGKFGLPRVVQIINEEFPNMGLPVQKQDLIAIAAAVKFAGSENIYPNKIGSYHVGDAHWATLVNSRMYHNIKLKHTLNDIVNLVEGSTVSLHGGRFVSWVIAKELDKKVEEIIISDVDDWVLSNTVNNLQDELNATIIAENDDKRASSQANFSIASSTMISIKENILKKVPHALTIV

SEQ ID NO: 12031 - protein, 299 aa, Methanobrevibacter gottschalkii
MNYKKLVLVGCISAFVAILTSVMGVAGTIIGSVISSVLYNMLTEVLENPIGKKTFSPSFEWEIAYVFPLIVIAIIQFILISALLSEVGILPYTFVNVYLSIQEIANNNLYRILGLALLVMSVYPFVLKRGIVKKSNGTVIAFVGLIFLARGFVDLGNRITEIYHAVFVYFDLPIAIIAFVLLVFVIINILISAKSVENEFKVISHSTNEENFSSPNVRRVHHSRKHNDFNYAERDISRQNYQNMNKHKHGDNVHEVKFKKVVKQESDRSKSSNSNQEAGINESSGNIQFESNDLLDDYK

SEQ ID NO: 12032 - protein, 294 aa, Methanobrevibacter gottschalkii
MSKKDKTLKDILDIILYDNPSTQDEIAVKLGITRRYVTQLLQPLVKDGTVKRAYMIDLKSYEKVAESLSDYAGSNETKGNVIVNDMIANMARHVHSQIEVSFDAVLEYDEEKANKALEMDYATNNMVEKIRTSVETIVSMNKHSEISKSMLYNELAYDLERIGDYCGHIAKFVINDVYEIDENVLKKLKKMYKIAQKMIRLAITSFIEGKTELKDDLMELEESIHILQTKAINLIAEQMAENSFDEKERSNYFIYLFRVVKAFERMGDISVEMMDVSIEFHENIPRSTTPRNFR

SEQ ID NO: 12033 - protein, 280 aa, Methanobrevibacter gottschalkii
MITKDTIKDTVYELYKQAVIVLGDDVKKSLKDALKIEEHDLARLNIEAILKNIELAKEKQIPMCQDTGLPVVFVRLGNVEVENLREGIEEGIKKATKEIPIRPNIVDPLTRENTNVNVGDYIPPIDIELIDEDYLEITILPKGFGSENNNALKMALPAEGIEGIKEFVVESVLKAKGKPCPPTVVGVGIGGTSDLCLKLGKKALLGEVGVRNPNPQIAKLEQEILDEINNSGIGPMGLGGKTTCLDVKILKAHTHTAGLPIGVCIQCWADRHATTKIYDN

SEQ ID NO: 12034 - protein, 81 aa, Methanobrevibacter gottschalkii
MRIMYSGNCTNCTTCGSCQQTQNVDTPILFCMHCQPSDAPCLKVCKENAIEVLGGAITINGEKCNKCRDCVEVCPINVIKI

SEQ ID NO: 12035 - protein, 166 aa, Methanobrevibacter gottschalkii
MESILVNSDLCDGCMNCENMCASVHNASRIKIIEHDSSFYSIVCQHCENAPCIKICPTEAVTEEGVDTEKCIGCGLCVMICPFGAMTFQSKVAEKCDLCADREEGPACIKSCTKRAISIADPEKIRSKNQQKYLAKMAGIYEPDSKKGGFVHVITGQARARLVFDE

SEQ ID NO: 12036 - protein, 288 aa, Methanobrevibacter gottschalkii
MDIPDKDLLAPGHRGCAGCGASIAVKLALNALGKNTVAISATGCLEVMTTPYPETSWEVPFIHVAFENSGAVASGVESALRIQGKDDVNVVAFGGDGGTVDIGLQSLSGAMERGHNMLYICYDNEAYMNTGIQRSGATPYGASTTTSPKGSASFGEDKPKKNMPMIMAAHGIPYVATASIAYPEDYVKKVKKAAETKGPAYIHLQQPCTTGWGYASEKTIEMGRLAVETGSWILYEIENGDFEITYRPEERKPVKDYISVQKRFKHLDEEQINKIQKYVDAHCKELGL

SEQ ID NO: 12037 - protein, 381 aa, Methanobrevibacter gottschalkii
MIKEVMTANKAVAEAVRLAKPQVIPVYPITPQTTISEYLAQYVADEKIDAKYIKVESEHSAISAAVGASGAGVRVFTATSSQGLMLMHEILFAAAGMRVPIVLADANRAISAPLNIWNDQQDSIAQRDAGWLQIYVENAQEALDSTLMAYKISENSNVLLPSMVCLDGFILTHTVEPVEIPDQESVDKFLPPYVPEHAFLDPNEPMTIGSFADTNYYIEARHDMEIAMNNSIEVIKKTCDEFAEIFGRKYGLVDPYKTEDADIIFVAMGSLCSTVRVIVDQLRENGEKVGLLKIRAYRPFPVEEIKEVIKDCEKLAVIDKNFTFGIGGALYADMKVKIDKEIYGFIAGLGGRDITPDSIMEIYEKTKEPVQDVTWIGLKEE

SEQ ID NO: 12038 - protein, 80 aa, Methanobrevibacter gottschalkii
MVSIGCVIKTPGNSKINKTGSWRTFKPILDKEKCIDCDNCIIFCPDSSVNKQHDIDYDYCKGCGICAHECPSDAIEMVKE

SEQ ID NO: 12039 - protein, 185 aa, Methanobrevibacter gottschalkii
MIIHDKCMEEKLMIEIRFHGRGGQGAVTAAELLAKAAFKDGKYSQAFPFFGVERRGAPVMAFTRIDTEPIALRYQIYNPDHVLVLDDGLLNVVDVFSGIKDTTEVIINTKTFEGSGEHTVNSIDATGVALDMLGRNIVNTIILGYFAKKTQIVSIESLLEVIRETFPGKVGELNVEATKKAYDMG

SEQ ID NO: 12040 - protein, 534 aa, Methanobrevibacter gottschalkii
MKVLIITGELAYPLIKEVVSNSKEDIIVHIADNTQVAAFLTPKQIIKEVKTCFSNQLDEIDMILVPGLIKKGTKEITKELGIPTFKGSTDGADLAMVLNLVGTIELSEDKPADKLIDEEKRKKAFKFIDEFENDKENIEKLLKKPNNILIKNLPVGEDFPMRVLSEIANAPFLSKEALINKCQYFVDSGADMIDIGMAAGEDFSDKIPELIDTLRPIVGGRPLSIDTLNTNEIKVAAENGIDLVLSLDLGNNSEVKEILKEKNIPAVLLPTNFSQGKSPKSPAERVEAMNQLIKDTEGLKYVADLILDPVNSSSIVESIIACNEFHKTNPAPMFFGVGNVTELMDADSGGVNVLLAGIGMELGVSILFTPEESGKTRGSVYELATASKMMFLAKHRKSIPKDLGINLVAFKDKHKRNDIILNERDGIPETMQEKPMKFIRDKAGSFKINVDYGTTVKHSKITATHFKKNKPDIVIVGHNAREIYEEIITKELVTRMEHAAYLGSELQKAEIAMITGKEYVQDFDLFKNPDEFKK

SEQ ID NO: 12041 - protein, 134 aa, Methanobrevibacter gottschalkii
MKADNAIIIVLVVLIILCGAVALVITNNGISFNNTSDSVVNNTTNTTNITANDTDETGATHDTGLVASSSDDGSSYSSSGYSSSSGSNSGSSSGHQSDNSQSSSGSESSSGSESNSEPESDSAGQSEGSSADFE

SEQ ID NO: 12042 - protein, 284 aa, Methanobrevibacter gottschalkii
MQAENISIKDIDKSLLDSNYVSNNEISTTLYLSLLLGKPMLIEGPPGVGKTELAKVVAKTFNRDFFRIQCYEGITFEQIVGEWNYQKQLLHLEAARNDSVREDKIFDEEFFIRRPLLNAFLNDNDSVLLIDEIDKADEEVESFLLQALGEQEITINDLGTFQLNNDLIVILTSNSQRSLLDETKDRCLFLYIPYPSIEREIEIVKSKLHNADDETVSYVVKLVHDIRNLNLMKKPSVRGTVDWVQSVMNLGTKNLDQSLKDSVGVAIKTESDKKRVLKDIFNKR

SEQ ID NO: 12043 - protein, 384 aa, Methanobrevibacter gottschalkii
MLTKIATLSAQLREKDLPVSVRSTQAAVQIYKNLGESDRNLLKTALMAIYVKDRYDIPKFNKIFDEVFTVNKKVEMPEQLQKSKAYEGTGPKSNKYVIKKQGSMASKVQKEKITNEKLKMLSGQPLLDEAKKLERDGELMNKDLTKLNRFDPRMLEICQRLGKRIANKRSRRKTKTTSNKIDIRRTIRANLKYGGVPFELVKAKPRPHKNEHLFLNDISGSCEWISSWFFMLMFSAQTAFKRSRTFEFDNKVIETTDALKEEYLIDSFVKVKDLRVKNLMVHGTSDMYSSFKSFQEQANINNKSYVIILSDCRDWAGPKVNGIPASVEIVEEMVKDSKKLIILNPEDKNKWDVVDSCVSLYRDAGAQIFEVNTLNQLAQFVEQM

SEQ ID NO: 12044 - protein, 305 aa, Methanobrevibacter gottschalkii
MQCSKCGNPKVIIKKEQSGQLLCKDCFIESIEKKAIKTIRKEKLLDKGDKVLVALSGGKDSVTTLEILNTFRQMHIIELCAVTVDEGIDNYRQDGVDIAIRHAERLGIEHKVVSLKDEYGITLDEIMQKENHKGSCTYCGVFRRTIINKAAREMGATKIATGHNLDDEVQGILMNYLEGNIDNLTKLGAKSESKAEEFTVKIKPLREIPEREIGLYVVAKELEVHFDSCPYAMQSFRGEISEVINHLAEKHPTIKYSTLRGYDKIKNVLKKELKKEFNHGRCSKCGEPAANELCKACSFLEELGM

SEQ ID NO: 12045 - protein, 67 aa, Methanobrevibacter gottschalkii
MQFILKYKSINEKRVLPNDNYTIKDLLDELQLSAQTIVSKQNGELVIEDTVIENGDEIQLVQIIYGG

SEQ ID NO: 12046 - protein, 287 aa, Methanobrevibacter gottschalkii
MDISYECGPCFLRQAREALDLSTDDENLKMEVMGEIFKFLSVTFREGTNSNSTGSSMHNIIKQKTGCMDPYYKEKVEGNEIAIKYLPEVKKILTEDDSLENYVKIAIIGNILDFGAFTLDDDIESVIKNSLKKDLAVKDIEEFENSLKTHDKVLYLVDNTGEIVFDKLLLSKIKEYDLNITIAVKSEPILNDATMVEALEVGLDEFGELVDIGAGTVGYVDSEISDEFRQIFDSHEFIISKGMGNYEGLTEIDLSDKDIYFLLCVKCNTIARHIGANLHDMLLFKKQ

SEQ ID NO: 12047 - protein, 244 aa, Methanobrevibacter gottschalkii
MIIGLIGFGNVSKNLVKLIKSDDITFITSMEDRSPKTIDAIEKSKIKVLDTFKDVAVACDILISANSPKSALEAAENYGKFTKGIYLDLNNISPDTTFKINQHVENLVDGAIIGKIDSPNPYLYISGEKAEELLFLNGFLQTKKISDNVGDVAILKLLRSSYTKTLSAILIESTELSREYDLEEEFFDILSLTEGDNFREKSISRINNTLNNSKRKSEEIEEIINYFNKNNLSMVRAALKKLNQ

SEQ ID NO: 12048 - protein, 422 aa, Methanobrevibacter gottschalkii
MLILIGISADFDPVHKGHEKLIKEARKLADNENKKVVVYLNKGFSANHAPFFVNFEARRDMALALGVDEVKSFEGLHHRLVLSYSVPIRLKQMIDDGITDYITSASISLDEIKSKAQKFIDEGNFVGMPKSYTNRNEIRWYAINQFLGSKLNYHVVKEFNKDKYSGRLIRQSIIDNGMVITDDVKKLLPKTTIEILQHEIDADRIPENRNWVEIYKKMNTYSRGNLEKIAYLNGNTINEIIKRRVYRDPESIWAVFRRSNYGPVMTRLAISSIEMGVTKKEVMDLMKGYESQGVIPDNQKVQRVIDRAWYVATSRLDAREANEKFRNEKIEVNSPLCLEAGLNLTKFETKITKEGLKTDLYVDKNGKISVQFKSEGKKIKTNLRLPAEEVTYLRYIMDSHFIPVNGHIKKSEKGFKVKVIIG

SEQ ID NO: 12049 - protein, 160 aa, Methanobrevibacter gottschalkii
MKTKFVSLLSILLGLIIVIFPIMGVIGVGSLIGLSALLMSIYLLIVGIAIIDYNNSGAILDLVLGLILLFLSICLIFNPSLLGFLTEISMYFAGIMLIIVAVVSLINNRNSRYGFYSGIIGIILGLLYIIIGTYLSNPIILGTLIGIWLVISGILKLMDR

SEQ ID NO: 12050 - protein, 360 aa, Methanobrevibacter gottschalkii
MEIENLTKDIRARAFEKKDPKTPEQVGASWYNDDLTYEGISKTLFMILPTPGCSWALGDSGGCTMCSYVSDCTLEPIDTETILRIFNDHLSRHPINEEDKISVKLFASGSFLNPYELPKDARDEILKTLVNLGNVTEIIVESRPEYVKEEYLDEIFEIIGDTLFEVSIGLETSNDYTRLKKINKGFTRDDFENATKLMQHQRKTKGYNLKTKAYIFVKPILVSEKQAITEAIETAEYCDSINVDRLSFCPATIHGGTVIERLWRKGAYQPPWIWSCVEIINTVRDELSIPALLDTSGFGSRRGPYNCKKCNKDLKQIIIANNLTQNKIEYECECKNEWLAEINNSDMNNSTVKVKHIPLY

SEQ ID NO: 12051 - protein, 319 aa, Methanobrevibacter gottschalkii
MKFGIEFVPNQPLDEIVKLVKLAEDVGFEYAWITDHYNNKNVYETLALLAANTETIKMGPGVTNPYVRSPAIAASAIATIDEISEGRATFGIGPGDKATFDALGIEWTKPVSTIKAAIADINTLLAGDKTEGGAALGGVKAVQEHIPIYMGAQGPKMLETAGEIADGVLINASNPKDYEAAMPMIKKGIEAAGDKEFDVGAYTATSIGPDSDAAKNAAKIVVAFIAAGSPPQVIERHGLPEGFNEKMGGFLAKGDFGGAIGAVTDEALDAFSVCGTPDEFIPKIEGLAEMGVTQYVAGSPVGKNVEESIKLLGDVIASF

SEQ ID NO: 12052 - protein, 301 aa, Methanococcoides burtonii
MEPLMGMGVLALMGAAATIAGTTEDLESDVGSQSNPNSQVQLAPQMMYPHRIYNKAISGEPPSNALICAIGGTVASVLMTANLSVIFAIAIGALVASAVHGTYCITAYMGRTASQKRFRQPIYLDILRSHTPVMMGYAFITTFCILVVSYIMVAVLAHPFPLTLLAFIWGITVGAIGSSTGDVHYGAEREFQNVEFGSGLNAANSGNIVRKAESGLRNGIDNSWFCAKFGGPVTGLAFGMTVFLSGWVTAVFNPAISLTMGWLSVAAGVILVLLLIIWNRKIEVAARKAFGPYKEEEEVAA

SEQ ID NO: 12053 - protein, 303 aa, Methanolobus psychrophilus
  source 1..303: note = strain R15
MEPLTSMGVMALIGAAATIAGASEDLESDVGSQSNPNSQVQLAPQMMYPHRIYNKAISGEPPSNALMCAIGGTVAAVLMSTGASVILALAVGAIVGAAVHGTYSVTGYFGRIASQKRFKQPLYLDIVQSHTPVIMGYAFITTFCILVISYLMTTVMGHPFSLPLLAFIWGITVGAIGSSTGDVHYGAEREFQNVEFGSGLNAANSGNIVRKAESGIRNGIDNSWFCAKFGGPATGIAFGMVVFLSGWITVVFDPSINETLGWESIIAGVVIVLLLAIWNRKIEVAARNAFGPYKKDEEAEVAA

SEQ ID NO: 12054 - protein, 293 aa, Methanobacterium paludis
MDPMITGLGVVALMGAAATIAGAAEDLESDTGSMSNPNSQVQLAPQMGNLHRIFNKAVSGEPVQMGVLAGIAGSVAFVLMGAVQLPVIMSIAGGAFIAALFHTAFATTSYLGRIVSESQFNQPVFMDVLTQTLGPIAAHGFIVTFCIVGLSYLMTLPLQGFGHPFPIPLLAVLWGITIGAIGSSTGDVHYGAEREYQTYPFGGGIPVSIHGDITTESELGPRNSIDVVHFCAKFGGPVTGFCFGLIVFLSFWTTLVFGAVGGVVAGIIIVLLLIVLNNRVEVFARGRYGPYKE

SEQ ID NO: 12055 - protein, 304 aa, Methanohalobium evestigatum
MDPLLGMGVLALMGAAATIAGATEDLESDVGSQSNPNSQVQLAPQMMHPHRIYNKAISGEPPSNALMCAIGGTIASVMMSAYGLSVVFAITFGAAIAAVVHGTYAASSFMGRVSSQKRFKQPLYLDIVRSHTPVIIGYAFLTTFFILVISYLMSSVLNHPFPLPLLAFIWGITVGAIGSSTGDVHYGAEREYQNVEFGSGINAANSGDIVRYGESGLRNGIDNAWFCSKFGGPVTGIAFGMTVFLSGWVTTVFNPGESITMGWLSVIAGLLIVAILIIGNRVIETWARSTYGPYQEDESEEVTA

SEQ ID NO: 12056 - protein, 301 aa, Methanomethylovorans hollandica
MDPLIGMGALALMGAAATIAGASEDLESDIGSQSNPNSQVQLAPQMSYPHRIYNKAISGEPPSNALMCAIGGTIAYVMLNANFSAVLALTIGSLVAAMVHGTYAVTSYMGRCSSQKRFKQMVYLDVLRSHTPAIMGYSFITTFSILVVSYLMMTVFAHPFPLPLLAFIWGITVGAIGSSTGDVHYGAEREFQDVEFGSGLNTANSGKIVRKAESGIRSSMDNSWFCAKFGGPVTGIAFGMTVFLSGWITTVFDPSKGPTAGWESVIAGALIVFIMIIYNRKIEIQARKAFGPYKEDKEEAA

SEQ ID NO: 12057 - protein, 301 aa, Methanothrix sp.
MDAFSMGLIAAMGALATVAGASEDIESDVGSQSNPNSQVQLAAQVGNPHRIYNKAISGEPPANALWCATAAIVAYTLITAFQMPALMALVAGASVAALFNGVFSMSSYFGRNSSQARFNQWIYLDIVRYTTPSIMAHAWITSFCIATISYIMVYMLPTPHPFPMPIIALIWGLAVGAIGSSVGDIHYGGEREFQNRAFGCGLNTMLSGQIVRKAEAGLRNSIDNAWFCTKFGGPATGMGFGLTVFLDNWRTTVFDPVTQASYAILMGVFFILVEVSYNHYIERSTRRKYGPYPEYKGDVAA

SEQ ID NO: 12058 - protein, 303 aa, Methanocaldococcus vulcanius
MDTTLIALGALALSGALATVAGCAEDAESDVGSQSNPNSQVQLAPQMGNIHRYYNKAISGEPVSYGLFVAVAGSIAYALIQAGINPILAIILGAGAAAFVHGAYAVSAYLGRIVGQSKNFGQPVYWDVVMSHLGPIVGHGFIAVFCMVLMAYLANTLLGDPFPLPLIAFIFGITVGAIGSSTGDVHYGAEREYQKYPFGGGVPVANHGDIDVEADYGIRNSMDSSYFCVRVGSVLTGLCFGLIVFLDGWRGVLGNILGGLSGGSAINASIISIVIGLIIVAAMAIINRKIEVFARNKFGPYTK

SEQ ID NO: 12059 - protein, 303 aa, Methanosalsum zhilinae
MEPLIGMGVLALMGAAAAIAGMSEDLESDVGSQSNPNSQVQLAPQMMYPHRIFNKAISGEPPSNALMCAIGGTTTAILMDSMGMSVLFSVAIGALVAALAHGSYSTMSFFGRPASQNRFKQPIYLDVLRSHIVAIMAFAFVTTFSIVIISYLMITALGHPFPLALLAFIWGIAVGAIGSSTGDVHYGAERQFQNTEFGAGLNAAQSGNIVRKGEAGLRNGIDNLWFCSRFGGPATGIAFAMTVFLSGWITLVFDPSISLTIGWLSVIAGLIIVLILIIFNRKLEVSARNTYGPYKADKEEVAA

SEQ ID NO: 12060 - protein, 295 aa, Methanocorpusculum labreanum
MQEIIIGIGVTALAGALAAVAGAAEDTESNIGSQGDPNSQVQLAPQMGYTHRIYNKAVSGEPPAYTLWVTLACGVAWAFLMLGVNAILAIIFGTVLATFVQGVYATTAYLGRTASLSKFGQPVFIDVVKSVTTVTMAHAFVAIFATVTVCYLMMTVIGHPFALPLLGIVWGLALGAAGSATGNPYYGKERQYQNQKFGAGVPISASGNIVRYAEAGQRSSIDNGFFTAKFGGPASGLCFGLIVFFELWRTIIFEDFLAGWGAVIVGAVVIIVFMIIDRYVEVWARKSYGPYTVEA

SEQ ID NO: 12061 - protein, 299 aa, Methanoregula formicica
MEHIVFGIGITALTGALATVAGAAEDTESNIGSQGDPNSQVQLAPQMGFLHRIFNKAVAGEPPAYGLWCCLGAGLAWAFMAMQFNAVLAIVLGSVLAVFVQGVYATTAYVGRTASLSKFGQPIYVDILKSMTTVTMAHAFIAIFATVAICQLINGALGHPFPLPLLGLIWGIALGAAGSATGNPYYGKERQYQNQKFGAGVPISASGNIVRYAEAGERNSIDNGWFTAKIGGSASGICFGLIVFLELWRTILFEQVAAGWGAIVVGVLIILVFTVIDRYIEVWARKTYGPYTEAKEASS

SEQ ID NO: 12062 - protein, 301 aa, Methanoculleus sp.
MEEIVFGIGITALAGALATVAGAAEDTESDIGSQGDPNSQVQLAPQMGYIHRIFNKAVAGEPPAYGLWVALGAGLAWAFMAMQINPILAIVLGSALAVFVQGVYATTAYLGRTASLAKFGQPVYIDILKSMTTVTMAHAFVAIFTTVAMCHLMISALGHPFPLPLLGLVWGIALGAAGSATGNPFYGKERQYQEQKFGAGVPISASGNIVRYAEAGQRNSLDNGFFSAKLGGPASGICFGLIVFFELWRTVVFEELNIWGPIIVGIVVILIFAIIDRYIEVWARKNFGPYTAPEAPEEASS

SEQ ID NO: 12063 - protein, 297 aa, Methanocella arvoryzae
MDELAVSLGTLALMGACATIAGAAEDLESDFGSQSNANSQVQLAPQVGYLHRIYNKAVCGEPVAYGLLAATGAAIALALATAFSLNIVISLALGATVAALMYGVYATTAYMGRITGQMRFGQPVYLDVLLVTTPSIIAHAFIATMAIATFSYLLNVIIGQPFPFPILALLWGIMTGGMGSAVGDVHYGAERQYQAKPFGMGLPIASSGKIIQKGEAGLRSSTDIAGFCVKHGGPLTGLGLGLTVFVDLWRHIIFIEFANGWGAMIAGLIIVLIIVAFNRIIELWARKNYGPYREAED

SEQ ID NO: 12064 - protein, 299 aa, Methanoculleus bourgensis
MEEIIFGIGITALAGALATVAGAAEDTESDIGSQGDPNSQVQLAPQMGYIHRIFNKAVAGEPPAYGLWVALGAGLAWAFMAMQINPILAIVLGSALAVFVQGVYATTAYLGRTASLAKFEQPVYIDILKSMTTVTMAHAFVAIFATVAMCHLIISALGHPFPLPLLGLVWGIALGAAGSATGNPFYGKERQYQEQKFGAGVPISASGNIVRYAEAGQRNSLDNGFFSAKLGGPASGICFGLIVFFELWRTVVFEPLAAGWGAVIVGVIVILIFAIIDRYIEVWARKTFGPYVAPEEASS

SEQ ID NO: 12065 - protein, 300 aa, Methanolacinia petrolearia
MEELLFGIGISAIAGALATVSGAAEDTESDIGSQGDPNSQVQLAPQMGYIHRIFSKAISGEPPAYGLWITLGAGLAWALMAINYNPVLAIILGSAIAVFVQGVYATTAYLGRTASLAKFEQPVYIDVIKSVTTVTMAHAFVAIFTCVTMCFLMVNALGHPFPLPLMGLVWGIALGAAGSATGNPFYGKERQYQSQKFGAGVPISASGNIVRYAEAGQRSSLDNGWFTSKLGGPASGVCFGLIVFLELWRTIFFEEFASGWGAVIAGIVLILVFMAIDRYIEKWARKTYGPYTEEKTEEAA

SEQ ID NO: 12066 - protein, 298 aa, Methanospirillum hungatei
MEEIVLGIGITALAGAFATVAGAAEDTESDIGSQGDPNSQVQLAPQMGYIHRIFNKAISGEPPAYGAWCAIGAGVAWALMQINYNPALAIILGSVIAVFVQGIYCTSGYLGRIASLAKFQQPVYIDIIKSLLSVTMAHAFVAIFCTVAMCYLMASALHHPFALPLLGLVWGIALGAAGSATGNPFYGKERQYQNQKYGAGVPISASGNIVRYAEAGQRSSLDNGWFTTKFAGPASGICFGLIVFLELWRTVLFEKMMGGWGAIIMGVVLILVFTFIDRWVEVWGRKTYGPYTTEEASS

SEQ ID NO: 12067 - protein, 301 aa, Methanoplanus limicola
MEELLFGIGISAVAGALATVSGAAEDTESDIGSQGDPNSQVQLAPQMGYIHRIYSKAISGEPPAYGLWCALGAGLAWALMAINYNPVLAIVLGSAIAVFVQGVYATTAYLGRTASLAKFEQPVYIDLIKSVTTVTMAHAFVAIFTCVSMCFLMVNALGHPFPLPLLGLVWGIALGAAGSATGNPFYGKERQYQTQAFGAGVPISASGNIVRYAEAGQRSSLDNGWFTSKMGGPASGVCFGLIVFLELWRTIFFEEFAAGWGAVIAGIVLILIFMIIDRFVETWARKTYGPYTEEKSEEASS

SEQ ID NO: 12068 - protein, 302 aa, Methanohalophilus mahii
MEPLIGMGVLALMGAAATIAGASEDLESDVGSQSNPNSQVQLAPQMMYPHRIFNKAISGEPPSNALIAAVGGASASVLMSAYSMSVVFAIAVGALIAAGIHGTYATTAYLGRSASQKRFRQPIYLDMVRSHVPVMMGFAYITTFCILVVSYLMTSVLAHPFPLTLLAFIWGITIGAVGSSTGDVHYGAEREFQNVEFGSGLNAANSGNIVRKAECGLRNGIDNSWFCAKFGGPLTGLAFGMVVFLSGWITTIFDPSMGANIGWLAIVAGLAIILILVLGNRRLEVFARKQYGPYKEDEEVTA

SEQ ID NO: 12069 - protein, 300 aa, Methanococcus aeolicus
MDPTLLALGALALSGAAATVAGCAEDLESDVGSQSNPNSQVQLGPQMGNIHRYFNKAISGEPVSYGLYVAAAGATAWALMGMNLNPILAIIVGSAVAALVHGAYSVSAFLGRIVGQSKNFGQPVYMDVMMGHLGPIVGHGFIAVFCMLFAAYLAVNALGNPFPLPLVALIFGITVGAIGSSTGDVHYGAEREYQKYAFGGGIPVANQGDIDIMAETGIRNGLDSSYFCSKLGGPLTGLAFGLIIFLDGWRSILGNIIGGDLITKAAIAIVVGLIVVITTLLLNRKIEVYARNKFGPYTDR

SEQ ID NO: 12070 - protein, 299 aa, Methanosphaerula palustris
MVDNIVFGIGITALAGALAAVAGAAEDVESDIGSQGDPNSQVQLAPQMGFIHRIFNKAVAGEPPAYGLWCALGAGIAWAFMAMQFNPVLAIILGCALATFVQGVYATTAYLGRTASLAKFGQPVYIDILKSMTSVTMAHAFVAVFTTVSLCYLMNAALGHPFPLPLLGLVWGIALGAAGSATGNPFYGKERQYQNQKFGAGVPISASGNIVRYAEAGQRNSLDNGWFSSKLGGPASGICFGLIVFLELWRTVIFEKVGGGWGSIIVGVIMILIFAIVDRYIETWARKNYGPYTTEETSA

SEQ ID NO: 12071 - protein, 300 aa, Methanocaldococcus fervens
MDATLIALGALALSGALATIAGCAEDLESDVGSQSNPNSQVQLAPQMGNIHRYFNKAISGEPVAYGLYVAVAGSVAYAIMQLGVTPLLAMVLGAGVAALVHGAYAISAYLGRIVGQSKNFGQPVYWDIVMSHIGPIVGHGFIAVFCMVLMAYLANTVLGNPFPLPLIALIFGITVGAIGSSTGDVHYGAEREYQKYPFGGGVPVANHGDIDVKAEYGLRNGMDSSYFCSRLGGPLTGLCFGLIVFLDGWRGVIGDVLQGGNVISASTISVVIGLIIVALLAIANRKVEVFARNKYGPYTK

SEQ ID NO: 12072 - protein, 303 aa, Methanocaldococcus jannaschii
MDATLIALGALALSGALATVAGCAEDLESDVGSQSNPNSQVQLAPQMGNIHRYFNKAISGEPVSYGLYVAVAGTVAYAIMQMGLNPILALILGAGVAAFVHGAYAISAYLGRIVGQSKNFGQPVYWDVVMSHLGPIVGHGFIAVFCMVLMAYLANTILGNPFPLPLIALIFGITVGAIGSSTGDVHYGAEREYQKYPFGGGVPVANHGDIDIKAEYGLRNGMDSSYFCSRLGGVLTGLCFGLIVFLDGWRGVLGDILKGGQGGSVITASIISIVIGLIIVAILAIINRKVEVFARNKYGPYTK

SEQ ID NO: 12073 - protein, 300 aa, Methanocaldococcus sp.
MDPTLIALGALALSGALATVAGCAEDLESDVGSQSNPNSQVQLAPQMGNIHRYFNKAISGEPVSYGLYVAVAGTVAYAIMQMGLNPILALILGAGVAAFVHGAYAISAYLGRIVGQSKNFGQPVYWDIVMSHIGPIVGHGFIAVFCMVLMAYLANTILGNPFPLPLIALIFGITVGAIGSSTGDVHYGAEREYQKYPFGGGVPVANHGDIDVKAEYGLRNGMDSSYFCSRLGGVLTGLCFGLIVFLDGWRGILGNILQGGNVTTASVISIVIGLIIVAILAVVNRKVEVFARNKYGPYTK

SEQ ID NO: 12074 - protein, 301 aa, Methanoregula boonei
MVDNIVFGIGITALAGALATVAGSAEDTESNIGSQGDPNSQVQLAPQMGFVHRIFNKAVAGEPPAYGLWCALGAGLAWAFLAMQINAVLAIVLGSLLAVFVQGIYATTAYLGRTASLSKFGQPVYVDILKSMTTVAMAHAFVAVFCTVTICYLINVALGHPFPLPLLGFIWGITLGAAGSATGNPYYGKERQYQNQKFGAGVPISASGNIVRYAEAGERNSIDNGFFTAKFGGPASGLCFGLIVFLELWRTILFDKIGAGWGAIIVGVLIILVFTVVDRYIEVWARKNYGPYTAPVKEAAP

SEQ ID NO: 12075 - protein, 293 aa, Methanobrevibacter sp.
MDPITLGVVALMGAAATIGGAAEDLESDVGSQSNPNSQVQLAPQMGHLHRIINKATSGEPVAYGVWCGVAGAVAFVFMSYLNVMPIVAIVLGAVVGAFVHSIYTVTSHMGRIVGQSQFGQPLFMDVLTECLGPIAGHGFIATFCIVGMSYLMIIPINGSALHIFPLPILAVLWGITIGAIGSSTGDVYYGSESEYQKFAYGAGTPVAIQGDIVTKEAIGAKNSIDVVGFCSRFGGPITGLCFGLIVFLSFWITIVFGTIGGQIAGIIIVLLLIYLNYKVETYARNKFGPYEEE

SEQ ID NO: 12076 - protein, 290 aa, Methanobrevibacter ruminantium; identical to SEQ ID NO: 6355

SEQ ID NO: 12077 - protein, 289 aa, Methanosphaera sp.
MEIFNMFLVILMGLFAIIAGIFEDLESDVASTSNPNSQVQLAPQIGNLHKLFNRAVSGEPLLVGSMATISGAVAYTLIYIHQPVLLVLIISSLVATIVQVIFSITSYMGRITSQALYNQPLFMDMLYKHIPTSAAHAFISLFSITTLSYIMVYSLTQPIQVALPIVTFFVGIMLGSIGSAVGDIFYGAEKLYQHHEFGSGIPVSVNGHITTKSALGSENSIDMAKFCSKFGGPISGLCFGIIIFLNFWTFLVFGIVGGLIVGLILVIFLIILNYVLERNARLIYGKYGE

SEQ ID NO: 12078 - protein, 295 aa, Methanobacterium formicicum
MDPTSMIAGLGVVALMGAAATIAGAAEDLESDVGSMSNPNSQVQLAPQMGNLHRMMNKAISGEPVQMGTLAGIAGSVAFVLMGSLQLPVIMSIAGGAAIAALVHAAFATTSHLGRIVSQSQFNQPLFLDVITQHLGPITGHGFIVTFCIVGLSYLMTLSLPGFAHPFALPFLAVLWGITIGAIGSSTGDVHYGAEREYQQYPFGGGIPVAIHGDITRNAELGARNSIDVVYFCAKFGGPVTGFAFGLIVFLSFWTTIVFGAAGGVIAGIVIVLLLIYINNRIEVFARNKYGPYKE

SEQ ID NO: 12079 - protein, 298 aa, Methanocaldococcus villosus
MDPILALGAIALSGALATIAGCAEDIESDVGSQSNPNSQVQLAPQMGNIHRYYNKAISGEPVAYGLYVAVAGGVAYALINMGLPMLLALIAGTGVAALVHGAYAISAYLGRIVGQSKNFGQPVYWDIVMTHIGPIVGHGFIAVFCMLLMAYIANTILGNPFPLPLIALIFGITVGAIGSSTGDVHYGAEREYQKYPFGGGVPVANHGDIDIKAEIGLRNSMDSSYFCVKLGGPLTGLCFGLIVFLDGWRGVIGDVIKGNDIMASSIISIIIGLTIVAILAIINRKVEVFAREKYGPYK

SEQ ID NO: 12080 - protein, 302 aa, Methanosarcina barkeri
MEPLISMGVLALIGVAATIAGASEDLESDIGSQSNPNSQVQLAPQMMFPHRIFNKAISGEPPSNALMCSIGAAVATVLISEFTMSPLFALVFGSLIAACVHATFAVTSTMGRCASQSRFKQPIYLDMIRSHITPIMGYAFITTFCILVVSYLMTVVLGHPFPLTMLAFIWGITIGAIGSSTGDVHYGAEREFQQFEFGSGLNASNSGNIVRYAESGLRDGFDNSWFCAKFGGPVTGLAFGMTVFLGSWITTIFDPAKGLGWLSVIAGIVIVFILIIWNWKMEVYARKAYGPYKEDKTEEASA

SEQ ID NO: 12081 - protein, 293 aa, Methanobacterium lacus
MDPMITGLGIVALMGAAATIAGAAEDLESDVGSMSNPNSQVQLAPQMGHLHRMFNKAISGEPVQMGTLAGIAGSVAFVLMSSVHLPVIMSIAAGGFIAALFHSAFATTSYLGRIVGQSQFDQPVFMDVITGHLGPIAAHGFIVTFCIVGLSYLMTLPVQGFNHPFPLPLLAVLWGITIGAIGSSTGDVHYGAEREYQTYPFGGGIPVAIHGDITTMSELGPRNSIDVVHFCAKYGGPVTGFCFGLIVFFSFWTTVVFGPTGGVIAGLVIVLAIIILNNRIELFARNQYGPYKE

SEQ ID NO: 12082 - protein, 299 aa, Methanotorris igneus
MDTTLIALGALALAGAAATIAGCAEDLESDVGSQSNPNSQVQLAPQMGNIHRYFNKAISGEPVSYGLYVAVAGAIAWALLNYGLNPVLALVAGSGVAAFVHGAYAVSSYLGRIVGQSKNFGQPVYMDVVLSHLGPIVGHGFIAVFCMVFAAYLANNVLGNPFPLPLVALIFGITVGAIGSSTGDVHYGAEREYQKYPFGGGVPVANHGDIDIKAEYGLRNGLDSSYFCSRLGGPLTGLCFGLIIFLDGWRGVLGEILGNDLMTKSVIAIIIGLLIVVVAAILNRKVEVFAREKYGPYTK

SEQ ID NO: 12083 - protein, 299 aa, Methanotorris formicicus
MDTALITLGALALAGAAATVAGCAEDLESDVGSQSNPNSQVQLAPQMGNIHRYFNKAISGEPVSYGLYVAVAGVVAWALLNYGLNPVLALVIGAGVAAFVHGAYTVSSYLGRIVGQSKNFGQPVYMDVILSHLGPIVGHGFMAIFCIVFAAYLANNVLGNPFPLPLVALIFGITVGAIGSSTGDVHYGAEREYQKYPFGGGVPVANHGDIDIKAEYGLRNGLDSSYFCSRLGGPLTGLCFGLIVFLDGWRGIIGDIIGSDLVTKSVIAIIMGLLVVVIAAIINRKIEVFAREKYGPYTK

SEQ ID NO: 12084 - protein, 299 aa, Methanocaldococcus infernus
MDTLLITLGALALSGALATIAGCAEDLESDVGSQSNPNSQVQLAPQMGNIHRYYNKAISGEPVSYGLYVAVAGSIAYAIIQAGFNPVLALIIGAGVAALVHGAYAISAYLGRIVGQSKNFGQPVYWDIVMSHIGPIVGHGFIAVFCMVLMAYLANTILGNPFPLPLIAFIFGITVGAIGSSTGDVHYGAEREYQKYPFGGGVPVANHGDIDIKAEYGLRNSMDSSYFCSRLGGVLTGICFGLIVFLDGWRGVLGNILEQKDPIISSVISIVIGLIIVVILAIVNRKVEVFAREKFGPYK

SEQ ID NO: 12085 - protein, 299 aa, Methanofollis liminatans
MESILLGVGVTALAGALATVAGAAEDTESNIGSQGDPNSQVQLAPQMGYIHRIYNKAVSGEPPAYGLWVTIGAGVAWAFMATGMNPVLAIVIASALAIFVQGVYAATAYLGRTSSLAKFEQPVYIDLLKSVTSVTMAHAFVAVFTTVSMCYLLNAALGHPFPLPLLGIVWGIALGAAGSATGNPFYGKERQYQSQMFGAGVPISASGNIVRYAEAGQRSSLDNGWFTAKLGGPASGVCFGLIVFLELWRTVLFEEAVGGWGAIIVGVIIILIFMIIDRYIETWARKNYGPYVKAEEASA

SEQ ID NO: 12086 - protein, 300 aa, Methanothermococcus okinawensis
MDPTIITLGALALAGAAATVSGCAEDLESDVGSQSNPNSQVQLGPQMGNIHRYFNKAISGEPVAYGLYVAVAGSVAWAIMHIGLNPILALIIGAGVAAFVHGAYAVSAYLGRIVGQSKNFGQPVYMDVILSHVGPIVGHGFIAVFCMLFVAYLATTILGNPFPLPLVAFIFGITVGAIGSSTGDVHYGAEREYQKYPFGGGIPVANQGDIDIKAEYGLRNGIDSSYFCSKLGGPLTGLCFGGIVFLDGWRGLMGDILGGDLVTKSSIAIVIGIIFVAIAAYINRVIEVYARKKYGPYTDR

SEQ ID NO: 12087 - protein, 305 aa, Methanobrevibacter sp.
MINLIKNMEEKIMDPITLGVVALMGAVATIGGAAEDIESDIGSQSNPNSQVQLAPQMGHLHRMINKAASGEPVAYGVWCGVAGSIAYVLMTLGITNDLFAIAAGSCVAAFVHSIYTITAHMGRIVGQSQFEQPLFMDVLTQSLGPIAGHGFITTFCLVGVSYLMTIPLNGTPLHAFPLPLLAVLWGITLGAIGSSTGDVHYGAESEYQKFEFGGGTPVAIQGDIVTKAPMGAKNSLDVGNFCVKFGGPLTGLCFGLVVFFSFWNSVVFGLYGGLVVGFIIVLILILMNDKLERFARKQYGPYEEE

SEQ ID NO: 12088 - protein, 304 aa, Methanobrevibacter sp.
MINLIKNMEEKIMDPVTLGVVALMGAVATIGGAAEDLESDIGSQSNPNSQVQLAPQMGHLHRMINKAASGEPVAYGVWCGVAGSIAYVLIMLGFVPIISIAMGSCVAAFVHAIYTVTSHMGRIVGQSQFEQPLFMDVLTQSLGPIVGHGFITSFCIVGISYLMIIPLNGTTLHVFPLPLLAVLWGIALGAIGSSTGDVHYGAESEYQKFEFGGGTPVAIQGDIVTNAPMGAKNSMDVVNFCAKFGGPLTGFCFGLVVFFSFWNTVVFGIYGGLVVGFIIVILLIIMNDRLEVFARNRYGPYEED

SEQ ID NO: 12089 - protein, 305 aa, Methanocella conradii
MEQLAVNLGALALMGACATIAGAAEDLESDFGSQSNANSQVQLAPQVGYLHRVYNKAISGEPVAYGFLCTTAASIAYAIAFVLAGNSAARINEFIVVGLIAGATIASLMYGVYATTAYMGRLSGQKRFGQPIYLDILLTTTPSIIAHAFIAALGISVFSYLLNIIIGQPFPFPILAMLWGIMAGGMGSAVGDVHYGAERQYQNKPFGAGLAAANSGKIIQKGEAGLRNSIDIAGFCVKHGAPLTGLGLGITVFADLWRHILFIEYWNGWGAMVAGLLIVLLWVIGNRLLEMWTRNTYGPYKSAEE

SEQ ID NO: 12090 - protein, 300 aa, Methanothermococcus thermolithotrophicus
MDPTLITLGALALAGAATTVAGCAEDLESDVGSQSNPNSQVQLGPQMGNIHRYFNKAISGEPVSYGLYVAVAGAVAWALMSTNLNAILALVVGSGVAALVHGAYSVSSYLGRIVGQSKNFGQPVYMDVLITHLGPIVGHGFIAIFCMALAAYLASTALGNPFPLPLIALIFGITVGAIGSSTGDVHYGAEREYQKYLFGGGIPVANQGDIDIKAEYGIRNGLDSSYFCSRLGGPLTGLCFGLIIFLDGWRGIVGNIVGSDLITKSVVAILVGLLIVGVAAYANRKIEVYARNKYGPYTNR

SEQ ID NO: 12091 - protein, 299 aa, Methanococcus maripaludis
MDPTLISLGALALAGAAATVSGCAEDLESDVGSQSNPNSQVQLGPQMGNIHRYFNKAISGEPVSYGLYVAVAGTIAWALINAGLNVVLAIIVGAGVAAIVHGAYSVSAFLGRTVGQSKKFGQPVYMDVLTSHIGPIVGHGFIAVFTMTLAAYLATTALGNPFPLPLVSLIFGITVGAIGSSTGDVHYGAEREYQKYPFGGGIPVANQGDIDIYAEYGVRNGLDSSYFCSRFGGPLTGLCFGLIIFLDGWRSILGNIIGGDLVTKTSIALLVGLLVVAVAAVINRKLEVYARNKYGPYRN

SEQ ID NO: 12092 - protein, 299 aa, Methanococcus maripaludis
MDPTLISLGALALAGAAATVSGCAEDLESDVGSQSNPNSQVQLGPQMGNIHRYFNKAISGEPVSYGLYVAVAGTIAWALINAGLNAVLAIIVGSGVAAVVHGAYSVSAFLGRTVGQSKKFGQPVYMDVLTSHIGPIVGHGFIAVFTMTLAAYLATTALGNPFPLPLVALIFGITVGAIGSSTGDVHYGAEREYQKYPFGGGIPVANQGDIDIYAEYGVRNGLDSSYFCSRFGGPLTGLCFGLIIFLDGWRSILGNIIGGDLVTKTSIALLVGLLVVAVAAGINRKLEVYARNKYGPYRN

SEQ ID NO: 12093 - protein, 299 aa, Methanococcus maripaludis
MDPTLISLGALALAGAAATVSGCAEDLESDVGSQSNPNSQVQLGPQMGNIHRYFNKAISGEPVSYGLYVAVAGTIAWALINAGLNVVLAIIVGAGVAAIVHGAYSVSAFLGRTVGQSKKFGQPVYMDVLTSHIGPIVGHGFIAVFTMTLAAYLATTALGNPFPLPLVSLIFGITVGAIGSSTGDVHYGAEREYQKYPFGGGIPVANQGDIDIYAEYGVRNGLDSSYFCSRFGGPLTGLCFGLIIFLDGWRSILGNILGGDLVTKTSIALLVGLLVVAVAAVINRKLEVYARNKYGPYRN

SEQ ID NO: 12094 - protein, 299 aa, Methanococcus maripaludis
MDPTLISLGALALAGAAATVSGCAEDLESDVGSQSNPNSQVQLGPQMGNIHRYFNKAISGEPVSYGLYVAVAGTIAWALINAGLNAVLAIIVGSGVAAIVHGAYSVSAFLGRIVGQSKKFGQPVYMDVLTSHIGPIVGHGFIAVFTMTLAAYLATTALGNPFPLPLVALIFGITVGAIGSSTGDVHYGAEREYQKYPFGGGIPVANQGDIDIYAEYGVRNGLDSSYFCSRFGGPLTGLCFGLIIFLDGWRSILGNIVGGDLVTKTSIALLVGLLVVAVAAVINRKLEVYARNKYGPYRN

SEQ ID NO: 12095 - protein, 299 aa, Methanococcus vannielii
MDPTLISLGALALAGAAATVSGCAEDLESDVGSQSNPNSQVQLGPQMGNIHRYFNKAISGEPVSYGLYVAVAGSVAWALINAGLNAVLALIIGSGVAAIVHGAYSVSAFLGRTVGQSQKFGQPVYMDVLTSHIGPIVGHGFIAVFTMVLAAYLAVTALGNPFPLPLVALIFGITVGAIGSSTGDVHYGAEREYQKYAFGGGIPVANQGDIDIYAEYGIRNGLDSSYFCSRLGGPLTGLCFGLIIFLDGWRSIVGNIIGGDLVTKTSIALVVGLLVVVAAMILNRKIEVFARNKYGPYRN

SEQ ID NO: 12096 - protein, 292 aa, Methanothermus fervidus
MDPAVASLGILALTTASAIIGQTIEDVETNIGSQSNPNSQVQLAPQMGNLHRFFNKAIAGEPFAYGTFCGVSGAITVAMLYLHLPAVIALAIGAAITTLIWLAYSTTAYLGRVSGSATFNQPVFLDMLTENLGPIAGHAFIVFFCITGVAYLMTLPVKGFAHPFPIPVIGMIWGMTIGAIGSAVGDVYYGAEAEFVHKKFGGGIPVASHGDITRKGVLGARSPMEVGNFTVKYGSPITGMAFGLIVLFTFWFDIVFEKWSILAAFLFVILLIVINNRLEKHAREKYGPYRRE

SEQ ID NO: 12097 - protein, 304 aa, Methanosarcina acetivorans
MEPLIGMGVLALIGVAATIAGASEDLESDVGSQSNPNSQVQLAPQMMFPHRIFNKAVSGEPPSNALMCSVGAAVATVLISEFTLSPLFALVLGALIAACVHGTFAVTSTMGRAASQSRFKQPVYLDMIRSHTPVIMGYSFITTFCILVVSYLMTVVLGHPFPLTMLAFIWGITVGAIGSSTGDVHYGAEREFQQFEFGSGLNASNSGNIVRYGESGVRNGYDNSWFCAKFGGPVTGMAFGMTVFLGSWVTTVFDPAVSISRGWISVVAGVIIVLILIFWNWKIEVKARNAYGPYKEDKTEEASA

SEQ ID NO: 12098 - protein, 304 aa, Methanosarcina mazei
MEPLIGMGVLALIGVAATIAGASEDLESDIGSQSNPNSQVQLAPQMMFPHRIFNKAISGEPPSNALMCSIGAAIATVLISEFTVSPLFALVFGSVIAASVHATFAVTATMGRCASQSRFKQPIYLDMIRSHTPAIMGYAFITTFCVLIVSYLMTVVLGHPFPLTMLAFIWGITIGAIGSSTGDVHYGAEREFQQFEFGSGLNASNSGNIVRYAESGLRNGFDNSWFCSKFGGPTTGIAFGMTVFLGSWITTIFDPAQGLSMGWLSVIAGVIIVLILIIWNWKIEVQARKAYGPYKEDKAEEASA

SEQ ID NO: 12099 - protein, 300 aa, Methanothrix harundinacea
  source 1..300: note = strain 6Ac
MVSMGLLAAMGALATVAGASEDLESDVGSQSNPNSQVQLAAQVGHTHRIYNKAISGEPPSNALYAALAAVTASVLMSGYGMNAFFAIAIGSVMAAIFNGIFSVTAYMGRNTSQARFNQYVYLDVLRTHTTAIMAHAYITAFCVVTISYIMTAPWLPIQHPFPFPLVAMIWGLAIGAIGSSTGDVHYGGEREFQNYIFGAGLNAANSGDIVTRAEAGLRSSIDNVWFCARFGGPVTGMAFGLTVFLDNWRTTIFDPATQGWYAVLTGIVIVILFIVYNRILEIRARKRYGPYPEYKGDIEA

SEQ ID NO: 12100 - DNA, 903 bp, Methanococcoides burtonii
  source 1..903: mol_type = genomic DNA
atggaaccactcatgggcatgggtgttctagcacttatgggcgctgccgcaactattgctggcacaactgaggatctcgaatctgatgtcggatctcagagtaacccaaattcacaagtacagctagcaccccagatgatgtatccacataggatctacaacaaagcaatttctggtgaaccaccatcgaatgcattgatttgtgctattggcggaaccgtggcatctgtattgatgactgcaaatctgtctgtgatctttgctatcgctattggtgcacttgttgcttcagcagtacacggaacatattgtatcacggcttacatgggccgtaccgcaagtcagaaacgtttcagacaaccaatctaccttgatattctcagatcacatacgccagtgatgatgggatatgcatttattacaacattctgtatccttgttgtatcatacattatggtggctgttctcgcacatcctttcccacttacgcttctcgcgttcatttggggaattactgtcggagctattggttcatccactggtgatgttcattatggtgcagagcgtgaattccagaatgttgagttcggatcaggtctcaatgctgcaaattccggaaacattgtaaggaaagcagaatccggtcttcgtaatggtattgacaattcctggttctgtgcaaagttcggaggcccagtaaccggtcttgcattcggtatgaccgttttcttaagtggctgggtaacagctgtctttaaccctgctattagccttacaatgggctggctttcagttgctgcaggagttattttggtgttacttttgattatctggaacagaaaaatcgaagtagcagcacgtaaggcatttggtccttacaaggaagaagaggaggtcgctgca

SEQ ID NO: 12101 - DNA, 909 bp, Methanolobus psychrophilus
  source 1..909: mol_type = genomic DNA; note = strain R15
atggaaccgctcacaagtatgggcgtaatggcactgatcggagccgcagcaactattgctggtgcctcggaggaccttgaatctgatgtagggtcccagagtaacccgaactcccaagtgcaattagcgccccagatgatgtatccacacaggatctataacaaagctatttctggcgaaccaccatcgaatgcacttatgtgtgctatcggcggaactgttgctgctgttctgatgagcaccggcgcatctgttatcctggcactggccgtaggagccattgtcggagcagctgtacatggtacttattcagtcacaggttattttggtagaatagcaagccaaaaacgtttcaaacagccactttatcttgacatcgtacaatcacacacccctgtaattatgggatatgcattcattactacgttctgtatacttgttatatcgtatcttatgacaaccgttatgggacacccgttctcactgccactgctggcattcatttggggaatcactgtcggtgcgataggatcttccacaggtgacgtccactatggtgcagagcgtgaattccagaatgtggagttcggatcaggactgaacgccgccaactctggaaacattgtgaggaaagcagaatccggtatcaggaacggtatcgataactcatggttctgtgccaagttcggaggacctgccacaggaatagccttcggtatggtcgtgttcctcagcggatggataactgtagtattcgatccttcgatcaatgaaacccttggatgggaatccatcatagcaggtgttgtcattgtactgttgctggctatatggaacaggaagatcgaagtggctgctcgtaatgcatttgggccttataagaaagatgaggaagcagaggtggcagct

SEQ ID NO: 12102 - DNA, 879 bp, Methanobacterium paludis
  source 1..879: mol_type = genomic DNA
atggaccctatgataacaggattaggtgttgtcgctctcatgggtgctgctgcaacaattgcaggagctgcagaggacttagaatctgatactggttcaatgagtaaccctaactctcaggttcaacttgctccccagatgggtaaccttcacagaatcttcaacaaagctgtttctggtgaaccagttcagatgggtgtacttgcaggtatagcaggttctgtagcgtttgtccttatgggtgcggtacagttaccagttataatgtcaatagctggtggtgcatttatagcagcattattccatacagcatttgcaacaacatcttacttaggaaggatagtgagtgaatcccagttcaatcaaccagtattcatggatgttcttacgcaaacactgggaccaatagctgcccatggatttatagtaacattttgtatagtaggattatcatatctaatgacattaccattacagggcttcgggcacccattcccaataccactactagcagtgctttggggtataacaataggtgcaataggttcatcaacaggagatgttcactacggtgctgaaagggagtaccagacctacccatttggtggaggtatacctgtctcaattcacggtgacataaccaccgagtctgaactcggcccaaggaactccattgatgttgtgcacttctgtgcaaaattcggaggaccagtcacaggattctgtttcggtcttatcgtgttcctgagcttctggacaacactggtgtttggagcagtaggtggagtagttgcaggtatcataatagttttattactgatagttctcaacaacagagtagaagtcttcgcaagaggcagatatggaccatataaagaa

SEQ ID NO: 12103 - DNA, 912 bp, Methanohalobium evestigatum
  source 1..912: mol_type = genomic DNA
atggacccactcttaggtatgggtgtactggcacttatgggagctgcagcaaccattgctggcgctacagaggatcttgaatctgatgttggatcgcaaagtaatcccaactctcaagtgcaacttgcaccccaaatgatgcatccacatagaatatacaacaaagctatttctggagaaccaccatcaaacgctctaatgtgtgcgattggaggtaccatagcttcagttatgatgagtgcatatggattgtctgtggtttttgcaattacatttggtgcagcaattgccgcagttgtacacggaacatatgcagcatcatcatttatgggtagagtttccagtcagaaacgttttaaacagcctttgtaccttgatattgttaggtcgcatacacctgttatcataggatatgcatttttaaccacattctttatactggttatatcctatctaatgtcatcggtactcaatcatccattcccattgccgcttcttgcgtttatatggggcattactgttggtgctattggttcatccactggtgatgtacactacggtgctgaacgagaataccagaacgttgaattcgggtctggtataaacgctgccaattctggagatatcgttagatatggagaatcaggcctcaggaacggtatcgacaacgcttggttctgttcaaaatttggaggaccagtcacaggaattgcatttggtatgaccgttttcctcagtggatgggtaacaaccgtattcaatcccggagaaagtattacaatgggctggctttcagtaattgccggcttgttaatagttgctattttgataatcggaaatcgagtcattgaaacctgggcacgcagtacctatggtccctaccaagaagatgaaagtgaagaggtgactgca

SEQ ID NO: 12104 - DNA, 903 bp, Methanomethylovorans hollandica
  source 1..903: mol_type = genomic DNA
atggacccgctcataggcatgggcgcgttagcacttatgggtgctgctgctaccatagcaggtgcatcagaagatctggaatccgatatcggatctcagagtaaccctaactctcaagtgcaacttgcgccccagatgtcgtatccacacaggatctataataaagccatttctggagaaccaccatcgaacgctcttatgtgtgctatcggtggaactatagcttatgttatgttgaacgccaacttttccgcagtgcttgcactgaccataggatcactggtcgcagccatggtacacggaacatatgcagtaacttcatacatgggcagatgctccagccagaaacgtttcaaacagatggtataccttgatgtgctgcgttctcacacgccggcaataatgggatactcattcataacaacattctctattcttgtagtatcttacttaatgatgactgtttttgctcatcccttcccgcttccgctactggcattcatatggggtatcaccgttggcgctatcggctcatccacaggtgatgtgcactatggtgccgagcgtgagttccaggatgtggagttcggttccggtcttaacaccgcaaactccggtaagatcgtaagaaaggcagaatccgggatcaggagcagtatggataattcctggttctgtgcaaagttcggaggacctgtaacgggtattgcctttggtatgacagtcttccttagtggatggataactactgttttcgatccgtcaaaaggccccacggccggatgggagtctgttattgcaggagctctcattgtcttcattatgatcatctataacagaaagatcgaaatccaggcaaggaaagcattcggtccctacaaagaagataaagaggaagcagca

SEQ ID NO: 12105 - DNA, 903 bp, Methanothrix sp.
  source 1..903: mol_type = genomic DNA
atggacgcatttagcatggggcttatagccgcaatgggagcccttgcgacggttgctggtgcctctgaagatatagaatccgatgtaggatctcagagcaatcccaactcgcaagttcagctggctgcccaggttggcaacccccacaggatttataataaggccatctcgggcgaaccgccggccaatgccctgtggtgtgccacagctgctatagtagcctatacgcttattaccgccttccagatgcccgcattgatggccctggtagcaggcgcatccgttgctgcactattcaacggtgtcttttcaatgagctcctactttggcaggaactccagccaggccaggttcaaccagtggatttatctggatatcgtcaggtacaccacgccatcgattatggcgcatgcctggataacatcattctgtattgcaactatatcgtatatcatggtatatatgctgccaacgccacatcccttcccaatgcccatcatcgctctgatctggggactggctgtgggtgccataggctcctcggtgggagatattcattatggcggcgagagggagttccagaaccgggcattcggctgcggtctgaacaccatgctctccggccagattgtgaggaaggcagaggcaggtctgagaaactccatagacaacgcctggttctgcaccaagttcggcgggccggccactgggatgggattcggcctgacggtctttctggacaactggcggacaacggtattcgatcccgtaacccaggcttcttatgccattctcatgggagtcttcttcattcttgttgaggtctcttataaccactatatagagaggtccaccaggagaaagtatggaccatatccagagtataagggggatgtagcagca

SEQ ID NO: 12106 - DNA, 909 bp, Methanocaldococcus vulcanius
  source 1..909: mol_type = genomic DNA
atggacacaacattaatagctctgggagcactcgctttaagtggagcattggcaacagttgcaggttgtgccgaggatgcagaatcagatgtaggttctcaatcaaacccaaactcacaggttcagttagcaccgcagatgggtaatatccacagatactataacaaggcaatatccggagagcccgtttcatatggattgtttgttgcggtagcaggatctattgcatacgctttaatacaggcaggcataaacccaatactggctataatactgggagcaggagctgcggcttttgttcatggtgcatatgcggtttcagcatacttgggaagaattgttggtcaatcaaaaaacttcggtcagccagtttactgggacgttgtaatgagccatttgggcccaattgttggacatggttttattgctgttttttgtatggttttaatggcatacttagcaaatacattattaggagatccgttcccgttaccattgatagcatttatatttggtattactgttggggcaattggttcctcaacaggagacgttcactatggtgctgaaagagagtatcaaaagtatccatttggaggaggagttccagttgctaaccatggagatattgatgttgaagcggattatggtataagaaatagcatggattcttcatacttctgtgtaagagtaggtagcgttttgacaggattatgttttggtttgatcgttttcttagacggatggagaggtgtcttgggtaatatattaggaggattaagcggaggaagtgcaataaatgcttcaataatatccatagttataggtttgataatcgttgctgcaatggctataataaacagaaagattgaggtatttgcaagaaacaagtttggaccatacacaaaa

SEQ ID NO: 12107 - DNA, 909 bp, Methanosalsum zhilinae
  source 1..909: mol_type = genomic DNA
atggaaccactcataggtatgggtgtattagcattgatgggtgctgctgctgcgattgccggcatgtcagaagatctggaatctgatgtcggatcacagagtaatcccaattcacaggtacagcttgcgccccagatgatgtatccacatagaatattcaataaagcaatttccggagaaccaccatcaaatgcactgatgtgtgcaataggtggtacgacaactgcaatattaatggattcaatgggaatgtccgttttattctcagttgctattggtgcactggttgcagctcttgcacatggatcatattcgactatgtctttctttggaagaccggcaagtcagaaccgtttcaagcagccaatatatctggatgttctaagatcccatatagtagccataatggcattcgcgtttgtcacaacgttttcaattgtaattatttcatatcttatgatcactgctctgggtcatccgttcccactggcattgctagcatttatatggggtattgcagttggtgcgatcggctcatctactggtgatgtccactacggagctgaaagacagttccagaacactgaatttggtgcaggcctgaatgctgcacagtctggtaacattgtaagaaagggtgaagccggactgcgtaacggaattgataatttatggttctgttccaggttcggaggacctgctacaggtattgcctttgcaatgacagtctttttaagcggatggatcacactggtctttgatccttccataagcctgacaattggatggctatcagtcattgcaggacttattatagtactgatattaatcatatttaacagaaaactggaagtatctgcaagaaatacctacgggccttacaaagcagataaagaagaggtggcagca

SEQ ID NO: 12108 - DNA, 885 bp, Methanocorpusculum labreanum
  source 1..885: mol_type = genomic DNA
atgcaagaaattataatcggcattggagtaactgcccttgcgggagctctcgcagcggttgccggtgcagccgaagatactgagtccaacatcggatcacaaggtgacccgaactctcaggtccagctcgcaccgcagatgggatacactcaccgtatctataacaaagcagtgagtggagaaccaccggcatacaccctgtgggtgacccttgcttgtggtgttgcatgggcattccttatgttaggagtcaatgcaatcctcgcaatcatcttcggaacagttctcgcaacctttgtgcagggagtttacgcaactactgcataccttggaagaaccgcaagtctttccaagtttggacagccggtctttattgatgttgttaaatcagtaacgactgtgactatggctcacgcattcgtagctatctttgcaacggtaaccgtatgttacctcatgatgacagtcatcggacatccgtttgctcttccgcttcttggtatcgtatggggtcttgctcttggtgcagcaggttctgcaaccggaaacccgtactacggtaaagagcgtcagtatcagaatcagaaattcggtgctggtgtccccatctctgcatccggtaacatcgttcgttatgcagaagcaggacagagaagctcgatcgacaacggtttcttcaccgcgaaattcggtggacccgcatcaggtctttgtttcggattaattgttttcttcgaactctggcgtaccatcatcttcgaggacttcctcgcaggatggggtgcagtgatcgttggagcagttgtaattattgtcttcatgatcatcgaccgttatgttgaagtctgggcacgcaagagctacggaccctacactgtggaggcc

SEQ ID NO: 12109 - DNA, 897 bp, Methanoregula formicica
  source 1..897: mol_type = genomic DNA
atggaacatattgtatttggcattggaattactgcattgacaggagctcttgccactgtagccggtgctgcagaagatactgaatccaacatcgggtcccagggtgacccgaactcacaggttcagctcgcaccgcagatgggtttcctgcaccgcatcttcaacaaggcggttgcaggagaacccccggcatacggtctctggtgctgtcttggcgccggactcgcatgggcattcatggccatgcagtttaacgcggttcttgctatcgttctcggttctgtactcgcagtctttgtacagggcgtttatgcaaccaccgcttacgttggcaggaccgcgagcctgtccaagttcgggcagccgatctacgtggacatcctgaagtccatgacgacggttaccatggcacatgcctttattgcaatcttcgcaaccgtggcgatctgccagctgatcaacggtgcactgggacacccgttcccgctgccgctgctcggtctcatctggggtatcgcactcggtgcagcaggatctgcaacgggcaacccgtactacggtaaggaacgccagtaccagaaccagaagttcggtgcaggtgtcccgatctcggcgtccggtaacatcgtccgctatgcagaagccggcgaaagaaactcaatcgacaatggctggtttaccgcaaagatcggtggctcggcatccggtatctgctttggcctgattgtcttcctcgaactctggcgtaccattctctttgagcaggtagcagccgggtggggcgcaatcgttgtcggtgtcctcatcatcctcgtcttcacggtcatagaccgctacatcgaggtctgggcacggaagacctacggaccctacaccgaggcaaaggaggcatcctca

SEQ ID NO: 12110 - DNA, 903 bp, Methanoculleus sp.
  source 1..903: mol_type = genomic DNA
atggaagagatcgtatttggcatcggcattaccgcattggcaggtgctcttgcaaccgtcgccggcgctgcggaagacactgaatctgatatcggatcacagggtgacccgaactcgcaggttcagctggctccgcagatgggatatattcaccgcatcttcaacaaggcagttgccggtgaaccccccgcgtacggcctatgggttgctctgggtgcaggccttgcttgggcattcatggcgatgcagataaacccgatacttgcaatcgtgcttgggagcgctctcgcggtcttcgtgcagggcgtgtatgcgactaccgcatacctcggccgtactgcaagtctcgccaagttcggacagccggtctatatcgatattctgaaatcgatgacgaccgtgaccatggcacacgcgttcgtagcaatcttcaccaccgtcgcgatgtgtcacctgatgatcagcgcactcggccaccccttcccgctcccgcttctgggtctcgtctggggtatcgcactcggtgcggctggatctgcaaccggtaacccgttctacggaaaggagcggcagtaccaggagcagaagttcggagcaggcgttccgatctctgcgtccggaaacatcgtccgctacgccgaggccggccagcggaactcgctcgacaacggtttcttcagcgccaaactcggcggccccgcgtcgggtatttgctttggcctgatcgtcttcttcgaactctggcgtaccgtggtcttcgaagaactcaacatctggggaccgatcatcgtcggtatcgtcgttatcctgatctttgccatcatcgaccgctacatcgaggtctgggcaaggaagaacttcggcccgtacacggctcccgaggctcctgaggaggcatcgtca

SEQ ID NO: 12111 - DNA, 891 bp, Methanocella arvoryzae
  source 1..891: mol_type = genomic DNA
atggatgaattggcagttagccttggaaccctcgcactgatgggcgcttgcgcaaccatcgcgggtgcagccgaggaccttgaatccgacttcggttcacagtccaacgcaaactcgcaagtgcagctggctccacaggtaggctatcttcaccgtatatacaacaaagcggtttgcggtgagcctgttgcctatgggcttttagccgctactggagctgctattgctctggccctggccacggcatttagcctcaacatagtaatatcgttagctctcggcgctaccgtcgcagcgctgatgtacggtgtatatgctacaacggcatatatgggcaggatcaccggccagatgaggttcggccagcccgtgtatctcgatgtattgctggtaactacaccttcgattattgcacatgcatttattgcaacgatggcaatcgcaactttctcgtaccttttgaatgttatcattggacaacccttcccgttcccgattctggctcttctctggggtatcatgactggcggtatgggctctgcagtcggtgacgtacactacggtgccgagaggcagtaccaggcaaagccgttcggtatgggccttccgatcgccagctcgggcaagatcatccagaagggcgaggctggcctcagaagcagcactgacatcgccggtttctgcgtaaagcacggcggtccgctgaccggtctcggtctcggcctgactgtcttcgtggacctgtggagacacatcatcttcatcgagttcgcgaacggctggggcgccatgatcgctggcctgatcatcgttctgattatcgtcgccttcaacaggatcatcgagctgtgggcgaggaagaactacggcccgtacagggaagcggaggac

SEQ ID NO: 12112 - DNA, 897 bp, Methanoculleus bourgensis
  source 1..897: mol_type = genomic DNA
atggaagagattatatttggcatcggcattaccgcattggcaggtgctcttgcaaccgtagccggcgctgcggaggatactgaatctgatatcggatcccagggagacccgaactcacaggttcagctagccccgcagatgggatatattcaccgcattttcaacaaagcagttgccggtgaacccccagcgtacggtctctgggttgcattgggagcaggccttgcctgggcatttatggcgatgcagataaacccgattcttgcaatcgtactcgggagcgctcttgcggtcttcgtgcagggcgtttatgcgacaaccgcatatctcggtcgtactgcaagtctcgccaagttcgaacagccggtctacatcgatatcttaaagtcgatgacgaccgtgaccatggcacacgcgtttgtagcgatctttgccaccgtcgcgatgtgtcacctgatcatcagcgcactcggccaccccttcccgctcccactgctgggtcttgtttggggtatcgcgctcggtgcagccggatctgcaaccggtaacccgttctacggaaaggagcggcagtaccaggagcagaagttcggagccggagtcccgatctccgcgtccggtaacatcgtccgctacgccgaggccggccaacggaactcgctcgacaacggtttcttcagcgccaaactcggcggccccgcgtcgggtatctgtttcggcctgatcgtcttcttcgaactctggcgtaccgtggtcttcgagccgctcgccgccggatggggagcggtcatcgtcggcgtcatcgtgatcctgatctttgccatcatcgaccgctacatcgaggtctgggcaaggaagactttcggcccctacgtggcccctgaggaggcatcatca

SEQ ID NO: 12113 - DNA, 900 bp, Methanolacinia petrolearia
  source 1..900: mol_type = genomic DNA
atggaagagttgttatttggcatcggtataagtgctatagcaggcgctctggcgacagtgtccggagctgcggaggatactgaatctgatatcggttcacagggtgacccgaactcgcaggttcagctggctccgcagatgggttatattcaccgtatattcagtaaagctatatccggcgaaccccccgcgtacggactctggattacgcttggagcaggtcttgcatgggcgctcatggcgatcaactataatccggttcttgcgattatccttggatcggcaattgccgtatttgtccagggtgtatatgctacaacagcataccttggaaggacagcaagtctggcaaaatttgaacagccggtctatatcgacgtgataaagtcggttacgaccgtgactatggcacatgcattcgtagctatttttacatgtgtcacgatgtgtttcctcatggtaaacgctctcggacaccccttcccgctcccgctcatgggtctcgtatggggtatcgctcttggtgcagcaggttctgcaacaggtaacccgttctacggcaaggagcgccagtaccagtcccagaagttcggtgcaggtgtaccgatctcggcatcaggtaacattgtccgctacgcagaggcaggacagcgcagttcactcgacaatggatggttcacatccaagctcggcggccccgcatccggtgtctgtttcggacttatcgtattcctcgaactgtggcgtacaatcttcttcgaagagttcgcaagcggttggggagcagttatcgcaggtatagtcctgattctcgtattcatggcaatcgacaggtacattgagaaatgggcccgcaagacatacggaccttatactgaggaaaagactgaggaggcggcc

SEQ ID NO: 12114 - DNA, 894 bp, Methanospirillum hungatei
  source 1..894: mol_type = genomic DNA
atggaagagattgtattaggcattggtattactgcattagcgggagcttttgccacagttgccggtgctgcggaagatactgaatctgatatcggatcacagggtgacccgaactcacaggttcagctcgctccgcagatgggttacattcaccgcatctttaacaaggcaatctccggagagccaccagcatatggagcatggtgtgccatcggagcaggtgttgcctgggcattgatgcagattaactacaacccggcacttgctattattctcggttcagttatcgccgtatttgtacagggaatctactgtacttccggttatcttggccgtatagcaagtcttgcaaagttccagcagccggtatacattgacatcatcaagtcattgttatcggtcactatggcacatgcgttcgtcgcgatcttttgtacggtcgcgatgtgttacctgatggcatcagcactccatcatccgttcgcactccccctgctcggactggtgtggggtattgcgcttggtgccgcaggatctgcaaccggaaatccattctacggaaaagaacgtcagtaccagaatcagaagtatggtgcaggtgttccgatctccgcatctggaaacatcgtccgatatgcagaagcaggacagcgttcctcccttgacaatggctggttcaccaccaagtttgccggtccggcatctggtatctgtttcggtctgattgtcttcctcgaactctggcgtaccgtcctctttgagaagatgatgggcggatggggagcaatcatcatgggagttgttctgattcttgtcttcacattcatcgaccgctgggttgaagtgtggggccgcaagacctacggaccatacaccaccgaggaggcctcgtca

SEQ ID NO: 12115 - DNA, 903 bp, Methanoplanus limicola
  source 1..903: mol_type = genomic DNA
atggaagagttactgtttggtatcggcattagtgccgttgcaggcgctctggccaccgtttccggtgctgcggaagatactgagtctgatatcggttcacagggtgacccgaattcacaggttcagctcgctccgcagatgggatatattcaccgtatatatagtaaagctatatccggtgaacccccagcatacggactttggtgcgctcttggagcaggccttgcttgggctttgatggcgataaattataatccggtacttgcgatagtcttaggatcagctatagctgtatttgtacagggtgtgtatgcaactacagcatatctgggaaggactgcaagtctggcaaagtttgaacagccggtttacatcgaccttattaagtcggttacaaccgtgactatggcgcatgcattcgttgctatctttacatgcgtatcaatgtgtttccttatggtaaacgcacttggacatccgttcccgcttccattgctgggacttgtctggggtatcgctctcggtgcagcaggttctgcaaccggaaatccgttctacggaaaagagcgccagtaccagacacaggcctttggagcaggtgtacctatctcagcatccggtaacattgtccggtatgcagaggcaggacagcgcagttcgcttgacaacggctggtttacatctaagatgggcggcccggcatcgggtgtctgtttcggacttattgtgttccttgaactgtggcgtacaatcttctttgaagaattcgcagcagggtggggtgcagtaattgccggtatcgtgcttattctgatctttatgatcattgacagatttgtcgagacatgggcacgcaagacctatggaccatacactgaagagaaatccgaggaggcctcatca

SEQ ID NO: 12116 - DNA, 906 bp, Methanohalophilus mahii
  source 1..906: mol_type = genomic DNA
atggaaccactcataggaatgggtgtgttggcactaatgggtgcagcggcaactatcgccggtgcatcggaagatctggaatccgatgtcggttctcagagtaacccgaactcccaggtacagctggcaccccagatgatgtatccacacaggatttttaacaaagccatttcaggtgaaccaccctccaatgcattaattgcagcggtcggaggtgcatctgcatcggtgcttatgagcgcctacagtatgtcagtggtctttgccatagcagttggagctctcattgcagccggtatacacggcacttacgcaacaactgcatatttgggaaggagcgcaagccagaaaagattcagacagcccatatatcttgacatggttcgttcacacgtacctgttatgatgggatttgcctatattaccacattttgtatccttgttgtgtcatatctcatgacatcagtcctggcacatcccttcccgcttaccctgcttgcattcatatggggtatcactataggagcagtaggctcttccaccggggatgtgcactatggtgcagaacgtgaattccagaatgtggaattcggatccgggcttaacgctgcaaactctggtaacatcgtgaggaaggcagaatgcggactgagaaacggtattgacaactcctggttctgcgccaaattcggaggacctctgacaggccttgcttttggtatggtagtattccttagtggatggatcactacaatatttgacccttcaatgggagccaatattggctggctggcaattgttgccggacttgcaatcatacttattttggtcttaggaaaccgcagactggaagttttcgcacgtaaacagtacggtccgtacaaagaagatgaagaggtgactgca

SEQ ID NO: 12117 - DNA, 900 bp, Methanococcus aeolicus
  source 1..900: mol_type = genomic DNA
atggacccaacattgttagctctcggagctcttgcattatcaggagccgctgctactgtggcaggatgtgcagaagatttggaatctgatgtaggttctcagtcaaaccctaactcccaggttcaattaggtcctcaaatggggaatatccacagatactttaacaaagctatctctggggaacctgtatcctatggattatatgttgctgcggctggtgctactgcatgggcattgatgggtatgaatttaaaccctattcttgcaattatagtaggttcagcagttgctgcattagttcacggtgcttactcagtaagtgcatttttaggtaggattgtaggacaatcaaagaactttggacagccagtatatatggatgtaatgatgggccatttaggccctattgtaggtcatggttttattgccgtattttgtatgctttttgccgcatatttggcagttaatgcattaggaaatccattcccattaccattggttgcattaatatttggtattaccgtaggtgctattggttcctcaacaggggatgttcattatggtgctgaaagagaatatcaaaaatacgcatttggcggtggaatacctgttgccaaccaaggagatatagacattatggcagaaactggtattagaaatggtttagattcttcatatttctgttcaaaattgggtggtcctttaacaggtcttgcgtttggtcttatcatattccttgatggatggaggtcaatacttggaaatataataggcggagatttaataacaaaggcggctattgctattgtggttggtcttattgtggttattactacattattactcaacagaaaaatcgaagtatatgctagaaataaatttggaccatatacagatagg

SEQ ID NO: 12118 - DNA, 897 bp, Methanosphaerula palustris
  source 1..897: mol_type = genomic DNA
atggtagacaacatagtatttggcattggaatcactgcattggcaggagctcttgctgccgtagccggtgctgcggaagatgttgaatctgatatcggctcacaaggagacccgaattcacaggttcaactcgcgccgcagatgggattcattcaccgcatcttcaacaaagcagtggcaggtgaaccccccgcatacggtctatggtgcgctctcggcgcaggtatagcatgggcttttatggcaatgcagttcaatccagttcttgcaatcatcctcggttgcgctctggcgacattcgttcagggcgtctacgcgacgactgcctacttgggcaggactgcaagtttagcaaagtttggacagccggtgtatatcgatatcttaaagtcgatgacatcggtcacgatggcacacgcatttgtggcggtcttcaccacagtgtcgctctgctatctgatgaacgcagcacttgggcatccattcccgcttccgctcctcggccttgtctggggtatcgcactcggtgcagcaggatctgcaactggcaacccattctatgggaaggagcgccagtaccagaaccagaagttcggagccggtgtcccaatatcagcatcaggaaacatcgtccggtatgctgaagcaggacagcggaactcactcgacaacggctggttctcctcgaagcttggcggccccgcatcagggatctgcttcggcctgatcgtcttcctcgaactctggagaacggtcattttcgagaaggtcggcggaggatggggttccatcatcgtcggtgtcatcatgatcctgatcttcgcaatcgttgaccggtacatcgagacctgggcacggaagaactacggaccatacaccacagaggagacgtccgca

SEQ ID NO: 12119 - DNA, 900 bp, Methanocaldococcus fervens
  source 1..900: mol_type = genomic DNA
atggatgcaacactaatagcccttggggctttagcgttaagtggtgcattagctacaattgccggatgtgcagaagatttagaatctgatgtaggttcccagtcaaacccaaactcacaggttcagttagccccacagatggggaatattcacagatactttaacaaagctatatctggagagcctgtagcttatggtttatatgtcgcagtagctggatcagttgcttacgctattatgcagttgggagtaactccacttttagcaatggtcttaggagctggtgttgctgcccttgttcatggagcttacgctatttcagcatacctcggaagaattgtagggcagtcaaagaacttcggtcaaccagtttactgggatattgtaatgagccacataggaccaattgttggacatggttttatcgctgtcttttgtatggttttaatggcttacttagctaacactgtattaggaaacccattcccattgccattgattgcattgatatttggaattactgttggggcaattggttcatcaactggagacgttcactatggtgctgaaagagaataccagaaatatccatttggaggaggagttcctgttgctaaccatggagatatagatgttaaagcagaatatggtttaagaaacggaatggattcatcatacttctgttcaagattgggaggtccattaactggattatgttttggtctaatcgtcttcttagacggttggagaggagttattggagacgtattacagggaggaaatgttatttcagcatcaaccatctcagtggttataggtttaataatcgtagccctcttagctatagcaaacagaaaagttgaggtctttgcaagaaacaaatacggtccatatacaaag

SEQ ID NO: 12120 - DNA, 909 bp, Methanocaldococcus jannaschii
  source 1..909: mol_type = genomic DNA
atggatgcaacactgatagcccttggggctttagcgttgagtggtgcattggcaacagttgctggatgtgcagaagatttggaatctgatgtagggtctcagtcaaacccaaactcacaggttcagttagctccacagatggggaatatacacagatactttaacaaggctatatctggggagccagtttcttatggtttgtatgttgcagttgcggggacagttgcttatgctattatgcaaatgggattaaacccaattttagcgttaattttaggagcaggagtagctgcttttgttcatggggcttatgctatttcagcatatttaggtagaattgtgggtcaatcaaagaactttggtcagccagtttattgggatgttgtaatgagccatcttggcccaattgttggacatggttttattgcagtcttttgtatggttttaatggcttatttagctaacactatattaggaaacccattcccactgccattgattgcattgatatttgggattactgttggtgcaattggttcatcaactggagacgttcattatggtgctgaaagagaatatcaaaaatatccatttggaggaggagttccagttgctaaccatggagatattgacattaaagcagaatatggtttaagaaacggtatggactcctcatacttctgttcaagattaggaggagttttaactggtttatgctttggtttaattgtatttttagatggttggagaggtgttttgggagatatattaaaaggaggtcagggaggaagtgtaataactgcttcaataatatcaattgttattggtttgataatcgtagctatattggcaataataaatagaaaggttgaggtctttgcaagaaataagtatggaccatacacaaaa

SEQ ID NO: 12121 - DNA, 900 bp, Methanocaldococcus sp.
  source 1..900: mol_type = genomic DNA
atggatccaacactaatagccctaggggctttagcgttgagtggagcattggcaacagttgcaggttgtgcggaagatttagaatcagatgttggttctcagtcaaacccaaactcacaggttcagttagcacctcagatggggaatatacacagatactttaacaaagctatatcaggggagccagtttcctacggtttgtatgttgcagttgcaggaacagttgcttatgccattatgcaaatgggattaaacccaattttagcattaattttaggagcaggagttgctgcctttgttcatggagcttatgctatttcagcatacttgggtagaattgtcggacaatcaaaaaactttggacaacctgtttattgggatattgtaatgagtcacattggcccaattgttggacatggttttattgctgtattttgtatggttttaatggcttatttagctaacacaatattaggaaatccattcccattgccattgattgcattgatcttcggtattactgttggggcaattggttcatcaactggagacgttcattatggtgctgaaagagagtatcagaaatatccatttggaggaggagttccagttgctaatcatggggacattgatgttaaggcagagtatggtttaagaaacggaatggattcatcatacttctgttcaagattggggggagttttaactggtttatgttttggtttaattgtattcttagatggatggagaggtattttaggaaatatactacaaggcggaaatgttacgactgcttcagtaatttcaattgttattggtttgataattgtagctattttggctgtagtaaatagaaaagttgaagtatttgcaagaaacaaatacggaccatatacaaaa

SEQ ID NO: 12122 - DNA, 903 bp, Methanoregula boonei
  source 1..903: mol_type = genomic DNA
atggtagataatattgtatttggcattggaattactgcattggcaggagcccttgccaccgtagccggttccgcggaagacactgaatccaacatcgggtcgcagggagacccgaactcacaggttcagctcgctccgcagatgggattcgtgcaccgtatcttcaacaaggcggttgcaggcgaacccccagcgtacggcctgtggtgtgctctgggagcaggacttgcatgggcgtttctcgctatgcagatcaacgcggtcctcgcgattgtcctgggctctcttcttgcagtcttcgttcagggaatctatgcgacaaccgcatacctgggcaggacagcaagcctttccaagtttggccagccggtctacgtggacatcttaaagtccatgacaacggttgccatggctcatgcttttgtagcagttttctgtaccgtcaccatctgttacctgatcaacgtcgcgctgggacacccgttcccgctgccgctgctcgggttcatctggggaatcaccctcggggcagcagggtcagcaacaggcaacccgtactacggcaaggaacgccagtaccagaaccagaagttcggtgccggtgtcccgatctcagcatcaggaaatatcgtccggtatgctgaagccggagagcgcaactcaatcgacaacgggttcttcaccgcaaagtttggcggccccgcatcgggtctctgctttggcctgatcgtattcctcgaactctggcgtaccatcctctttgacaagatcggagcaggctggggcgcaatcatcgtcggtgtcctgatcatcctcgtcttcacggtcgttgaccggtacatcgaggtctgggcacgcaagaactacggtccctacactgcacccgtaaaggaggcagcacca

SEQ ID NO: 12123 - DNA, 879 bp, Methanobrevibacter sp.
  source 1..879: mol_type = genomic DNA
atggaccctataactttaggtgttgtcgcattgatgggtgctgctgcaactatcggtggagctgcagaagatttagaatctgatgtaggttcacaaagtaaccctaactcacaagttcagttagctcctcaaatgggacatttacatagaattataaataaggcaacttccggtgaacctgtagcatacggtgtatggtgtggtgttgctggtgctgttgcatttgtatttatgtcatacttaaacgtaatgcctattgtagcaattgtattaggtgcagttgttggtgctttcgttcattctatttatacagtaacttctcatatgggacgtattgtaggtcaatctcaatttggacaaccattgtttatggatgtattgactgaatgtttaggaccaattgctggtcatggatttattgctactttttgtattgttggtatgtcttatttaatgattattcctattaatggaagtgctttacacatattcccattaccaatcttagctgtactttggggtataactattggtgctatcggatcatctactggtgatgtatactatggatccgaaagtgaataccaaaaattcgcttacggtgctggtactcctgtagctattcaaggggatattgtaactaaagaagctatcggagctaaaaactctattgatgtagtaggtttctgttctagatttggtggacctattactggattatgtttcggtttaatcgtatttttaagcttctggattactattgttttcggaactattggtggacaaattgctggtattattattgttttacttttaatttacttaaattacaaagttgaaacctatgctagaaataaatttggtccatatgaagaggaa

SEQ ID NO: 12124 - DNA, 870 bp, Methanobrevibacter ruminantium
  source 1..870: mol_type = genomic DNA
atggaccctattacattaggtgtagtcgcattgatgggtgcagcagcaaccattgcaggtgctgcagaggacttagaatctgacatcggttcacaaagtaaccctaactctcaggttcagctcgctccacaaatgggacacttacaccgtatgataaataaggcagcttctggggaaccagtagcatacggatgctggtgtggtatttccggtgctattgcagctcttgctatgggtatgggtattatacctatagtggcaattgcaatgggttctactgtcgctgcacttgttcacgcaatttatacagtcacatcacacatgggaaggattgtcggtcaatctcaatttgaacaaccattatttatggacgtattaacccaatccttaggccctatcgcagctcatggttttatagctagtttcggtattgtaggaatcgcttatttaatgactcttccattagacggacttggacacccattcccattaccattactcgctgtactttggggaattactattggtgcaatcggatcatccacaggggatgttcattatggtgcagaaagtgaataccaaaaattcgactacggtggaggtactcctgtagcgattcaaggggatatcgtaactaaagctcctctcggtgctaaaaactctatcgatgtaggtaacttctgtgctaaatatggtggacctttaaccggattctgttttggacttattgttttcgtaagcttctggattactgttgtattcggagctttaggaggacaaattgtaggtattgtcatcgttattttattaatcgctgctaattacttacttgaaaagtctacaagagcaaaattcggaccatatgaggaa

SEQ ID NO: 12125 - DNA, 867 bp, Methanosphaera sp.
  source 1..867: mol_type = genomic DNA
atggaaattttcaacatgtttttagttattttaatgggattatttgcaattattgcaggaatatttgaagatttagaatctgatgtagcatcaactagtaatccaaattcacaagtacaacttgcaccacaaataggtaatttacataaattatttaatagagcagtttctggtgaaccattacttgttggttcaatggctacaatatctggtgcagtagcatacacattaatatatatacaccaaccagttttattagtacttataatatcttcacttgttgctacaatagttcaagtaatattttccattacttcatacatgggtcgtataacaagccaagctttatataatcaaccattattcatggacatgctatataaacacattcctacaagtgcagcacatgcatttataagcttattttcaattacaacactgtcttacatcatggtttattcattaacacaacctatacaagtagctctacctatagtaacattctttgtgggaataatgttaggttctattggttctgctgtaggagatatattttatggtgctgaaaaattatatcaacatcatgaatttggaagtggaattccagtttctgtaaatgggcatataacaacaaaatcagctctaggttcagaaaattctattgacatggcaaagttctgttctaaatttggtggacctatctctggtttatgttttggaattatcatctttctgaatttctggacatttttagtatttggaattgttggaggattaatagtaggattaatattggttatttttttaataatactaaattatgtattggaacgaaatgcacgtttaatatatggaaaatatggggaa

SEQ ID NO: 12126 - DNA, 885 bp, Methanobacterium formicicum
  source 1..885: mol_type = genomic DNA
atggaccctacgagtatgatcgcaggattaggtgttgttgctctaatgggtgctgctgcaaccattgctggtgccgcagaggatttagagtccgatgtcggatccatgagtaaccctaactctcaggtacaactggcaccccagatgggcaaccttcacagaatgatgaacaaggccatatctggtgaaccagtacagatgggtaccttagcaggtattgccggttctgtagcttttgttctgatgggatcactgcaactaccagttataatgtcaatagctggaggagcagccatagcagctttggttcacgccgcattcgccacaacatctcatttaggaaggatcgtaagccaatcccaatttaatcaaccattattcctggatgtaataacccagcacttaggaccaataactggtcacggatttatagtaaccttttgtatagtaggattatcatacctgatgactttaagcttaccaggcttcgcccacccatttgcactgccattcttagcagtattgtggggaataaccatcggtgccataggttcatcaacaggagatgttcactatggtgctgaaagggaataccaacagtacccattcggtggaggtatcccagtcgcaattcacggtgacataaccagaaatgcagaactcggtgccaggaactccatagatgtagtttacttctgtgccaaattcggtggacctgttacaggatttgcctttggactcatagtattcttaagcttctggaccacaatagtattcggagctgctggaggagtaattgccggtatcgtaatagtcttactcttaatatacatcaacaaccgaatcgaagtatttgccagaaacaaatacggaccatacaaggaa

SEQ ID NO: 12127 - DNA, 894 bp, Methanocaldococcus villosus
  source 1..894: mol_type = genomic DNA
atggaccctattttagctttaggtgcaatagcattaagtggggcattggcaacaatagcaggatgtgctgaagatattgaatctgatgttggttctcaatcaaatccaaattcacaggttcaattggctccacagatgggaaatatacacagatattacaataaagctatttctggagaacctgtagcttatggcctttatgtagctgttgctggaggggtagcttatgctctaataaatatgggactgccaatgttattagctttaatagcaggtactggagttgcagcgcttgttcatggggcttatgcaatttctgcttatttgggaagaattgtagggcagtcaaaaaactttggtcagccagtttattgggatattgttatgacacatattggtcctattgttggacacggttttatagctgttttttgtatgttactaatggcttatatagctaatacaatattaggaaacccattcccattaccattaatagcattaatatttggaattacagttggagctattggttcatccactggagacgtccattatggtgctgaaagagaatatcaaaaatacccatttggaggaggagttccagtagctaaccatggggatattgatataaaagctgaaattggtttaagaaacagtatggactcatcatatttctgtgttaagttaggaggtccattaacagggttatgttttggtttaattgttttcttagatggttggagaggagttattggtgatgtgataaaaggtaatgacataatggcttcatctatcatatctataataataggattaaccatagttgctatattagcaataataaatagaaaagtagaagtgtttgcaagagaaaaatatgggccatacaaa

SEQ ID NO: 12128 - DNA, 906 bp, Methanosarcina barkeri
  source 1..906: mol_type = genomic DNA
atggaaccactcataagcatgggagtgcttgcacttattggagtggctgcgaccattgcaggtgcctcagaggacctggaatctgatatcggttcgcagagtaaccctaactctcaggtgcagttagctccccaaatgatgtttccccacagaatatttaacaaagcgatatcgggagaaccaccatcaaatgcattaatgtgttcgattggtgcagccgttgcaacagtattaataagtgagtttaccatgtccccactctttgcactggtatttggttcacttattgcagcatgcgtgcacgctacttttgcggtaacttctacaatgggcagatgtgccagtcagagtcggttcaagcagccgatttatcttgatatgataagaagtcacatcacaccaattatgggatatgcgttcataacaaccttctgtattctagtggtatcatacttgatgaccgttgtactcgggcatcccttcccgctaactatgctggcttttatatggggtatcacgataggtgcaattggatcgtcaacaggcgacgttcactacggtgcagaacgtgagttccagcagtttgaattcggttcaggtctgaacgcttcaaactcaggaaacattgtaagatatgccgaatccggccttagggatgggttcgataactcctggttctgtgccaagttcggaggtcctgtcacagggcttgcttttggtatgactgtattccttggaagctggataaccactatttttgatcctgcaaaaggcctgggatggctctctgttattgcaggcattgttattgtctttattttaattatctggaactggaagatggaagtttatgcccgcaaagcatatgggccttataaagaagataagactgaggaggcttcagca

SEQ ID NO: 12129 - DNA, 879 bp, Methanobacterium lacus
  source 1..879: mol_type = genomic DNA
atggaccctatgataacaggattaggtattgttgctctcatgggcgcagccgcaaccattgcaggggccgcagaggacttggaatctgatgtaggttctatgagtaacccaaactcacaagttcagctggcaccgcagatgggacaccttcacaggatgttcaacaaggccatatcaggagaacccgtacagatgggtacacttgctggtatagctggttcagtggcatttgttcttatgagttcagtacatctaccagttataatgtcaatagctgcaggtggatttattgcagcattattccattctgcatttgcaacaacatcttacttaggtaggattgtaggacaatctcaatttgatcaaccagttttcatggatgttatcactggtcacttaggaccaatagcagcccatggatttatcgttacattttgtatagtaggattatcatatctcatgactttaccagttcaaggatttaatcacccattcccattaccgctactcgcagttctatggggtattaccattggtgctataggatcatccactggggatgttcactacggtgctgaaagggaataccagacttatccatttggtgggggtatacctgtggctatccacggtgatatcacaaccatgtctgaactgggaccaagaaactcaatagatgttgtacatttctgtgcgaaatatggaggaccggtgacaggattctgttttggactaatagtattcttcagtttctggacaacagtagttttcggaccaactggaggagttatagcaggtcttgtaatagttttagcaattataatcctcaacaacagaatcgagcttttcgcacgaaatcaatatggaccatacaaagaa

SEQ ID NO: 12130 - DNA, 897 bp, Methanotorris igneus
  source 1..897: mol_type = genomic DNA
atggatactacattaatagcccttggagcgttggctttggcaggagcagcagcaacaattgctggatgtgcagaagacttagagtctgacgtaggttctcagtccaaccctaactcacaggttcagttagctccacaaatgggtaacatccacagatacttcaacaaggcaatttcaggggagccagtttcatacggtttgtatgttgctgttgctggtgcaatagcatgggcattattaaactatgggttgaatcctgttcttgcattggtagctggttctggtgtggcagcatttgttcatggagcttatgcagttagctcatacttaggtagaattgttggtcaatcaaagaacttcggtcaaccagtttacatggatgttgttttaagccacttagggcctatagtagggcatggatttatagcggtattctgtatggtttttgcagcatatttagcaaataatgtattaggaaacccattcccattgccattggtagcattgatatttggtattacagttggggcaattggttcctccacaggagacgttcactatggtgctgaaagagaatatcaaaagtatccatttggaggaggggttcctgtcgctaaccatggagatattgatattaaagcagaatatggtttaagaaatggtttggactcatcgtacttctgttcaagattaggtggaccattaacagggctttgctttggtttgattatattcttagatggttggagaggcgttttaggtgaaattcttggaaatgatttaatgacaaaatcagttattgcgatcattatagggcttttaattgttgttgtcgctgcaatattaaatagaaaagttgaggtatttgcaagagagaaatacggaccatacacaaaa

SEQ ID NO: 12131 - DNA, 897 bp, Methanotorris formicicus
  source 1..897: mol_type = genomic DNA
atggatactgcattaataacccttggggctctggctttggcaggagcagcagcgacagttgctggatgtgcagaagatttggaatcagacgtgggttcccaatccaaccctaactcacaggttcagttggctccacaaatgggtaacatccatagatacttcaacaaggcaatttcaggggagccagtttcatacggtttatatgttgcagttgcaggagtagtggcatgggcattgttaaactatgggttgaatcctgttcttgcattagtgattggtgctggtgtggctgcatttgttcatggggcttatacagttagctcatacttgggtaggattgttggtcaatcaaagaacttcggtcagcctgtatatatggatgttattttaagtcacttgggacctatagtagggcatggttttatggcaatattctgtatagtttttgcagcatacttagcaaacaacgtattaggaaatccattcccattgccattggttgcattgatatttggtattacagttggggcaattggttcatcaactggagacgttcactatggtgctgaaagagagtaccaaaagtatccatttggaggaggagttcctgttgctaaccatggggatattgatattaaggcagaatatggtttaaggaatggtttggattcatcatacttctgttcaagattaggtgggccattaacagggctttgctttggtttaattgtgttcttagatggttggagaggaattataggggatattattggaagtgatttagtaacaaaatcagttattgcaattatcatggggcttttagttgttgtaattgctgcaataataaacagaaaaattgaggtatttgcaagagagaaatacgggccatacacaaaa

SEQ ID NO: 12132 - DNA, 897 bp, Methanocaldococcus infernus
  source 1..897: mol_type = genomic DNA
gtggatactttgttaataactcttggagccttggcattaagtggagctttagcaacaatagctggctgtgcagaggatttagagtcagatgttggatctcagtcaaaccctaactctcaggttcagttagctccacagatgggaaatatccatagatattacaacaaagctatctctggggaaccagtttcctatggtttatatgttgcagttgctggatctatagcttatgctataatacaagctggatttaacccagtcttagccttaattattggagctggagtagcagctttagttcatggagcttatgccatctcagcatacttaggaagaattgtaggtcaatctaagaactttggccagccagtatattgggatattgttatgtctcatataggccctattgttggacatggttttattgctgtgttttgtatggttttaatggcttacttggctaatacaatcttaggaaatccattcccactaccattaatagccttcatatttggtattacagttggagcaattggttcctcaactggagatgtccactatggagctgagagagagtatcagaagtatccttttggtggaggggttccagtagctaaccatggagacattgatataaaagctgagtatggtttaaggaacagtatggattcctcttacttctgttccagacttggaggggttctaacaggaatttgttttgggctaatagtcttcttagatggatggagaggagttttagggaatatattagagcaaaaagatccaatcatttcatcagttatctctatagttataggattaataatagttgttatattggcaattgtcaacagaaaagtggaagtgtttgcaagggagaagtttggcccatacaaa

SEQ ID NO: 12133 - DNA, 897 bp, Methanofollis liminatans
  source 1..897: mol_type = genomic DNA
atggaaagcatattattaggcgtaggagtaacagcattggcaggtgctcttgctaccgttgccggcgctgccgaggacactgagtccaacatcggatcacagggtgacccgaactctcaggtccagttggctccgcagatgggctatattcaccggatttacaacaaggctgtatccggcgaaccgcccgcatatggtctgtgggtcactatcggcgcaggcgtggcctgggcatttatggcaaccggcatgaacccggtgcttgctattgttattgcgtccgcacttgcgatcttcgtgcagggcgtgtatgcggcgactgcctaccttggcaggacgtcgagtctggcaaagtttgaacaaccggtatacatcgacctactcaagtcggtgacctccgttacgatggcgcacgcctttgttgcggtattcacgaccgtatcgatgtgttacctcctgaacgcggctctcggtcacccgttcccgctgcctcttcttggcatcgtctggggtatcgctctcggtgccgctggttctgcaaccggcaaccccttctatggaaaggagcggcagtaccagtcccagatgttcggcgcaggcgttccgatctccgcatccggcaacatcgtccggtatgccgaggccggtcagcgcagctcccttgacaacggctggttcaccgcaaagctcggcggcccggcatcgggtgtctgcttcggtctgatcgtcttcctcgagctctggagaaccgtcctcttcgaggaggccgtcggcggctggggcgccatcatcgtcggtgtcatcatcatcctgatcttcatgatcatcgaccgctacatcgagacctgggcccgcaagaactacggcccgtacgtgaaggctgaggaggcatcggca

SEQ ID NO: 12134 - DNA, 900 bp, Methanothermococcus okinawensis
  source 1..900: mol_type = genomic DNA
atggacccaacaataattacacttggagcattggcacttgcaggagctgctgctactgtttctggatgtgccgaagatttggaatctgatgtaggttctcaatcaaaccctaattctcaggttcagttagggccacagatgggtaatattcacagatactttaataaagctatatctggggaacctgtagcttatggattatatgttgctgttgcaggttcagtagcatgggctattatgcatattggattaaaccccattcttgcattgattataggggcaggagtagctgcatttgttcatggagcatatgctgttagtgcatatttgggaagaattgtaggtcaatcaaagaattttggtcaacctgtatatatggatgttattttaagtcatgttggacctattgttggtcatggttttatagctgtattttgtatgctttttgtcgcatatttggcaaccactattttaggaaatccattcccattaccattggtagcatttatatttggtattacagtaggtgctatcggttcatcaacaggggatgtacattatggtgctgaaagggaatatcaaaaatacccatttggtggaggtattcctgttgccaatcaaggtgatattgacattaaagcagaatatggtttaagaaatggtatagattcatcctatttctgttcaaaattaggaggtccattaacaggtctttgttttggaggaatagtatttttggatggatggagaggattaatgggagatatattaggtggtgatttggtaacaaaatcatcaattgccattgtaatcggaataatattcgtagcaatagctgcatatataaatagagtaattgaagtatatgcaagaaaaaaatatggtccatatacggatagg

SEQ ID NO: 12135 - DNA, 915 bp, Methanobrevibacter sp.
  source 1..915: mol_type = genomic DNA
atgatcaatttaataaaaaatatggaggaaaaaattatggaccctataacattaggtgttgtcgcattaatgggtgcagttgcaactattggtggtgctgctgaggatattgagtctgatattggttctcaaagtaaccctaactctcaagttcaacttgctcctcaaatgggacatttacatcgtatgataaacaaagcggcttctggtgaaccagtcgcttatggtgtttggtgtggtgttgctggatctattgcatatgtattaatgactttaggaattactaatgatttatttgctattgcagcaggttcttgtgtcgctgcttttgttcacagtatttatactattactgctcacatgggtaggattgttggtcaatctcaatttgaacaaccattatttatggatgtattgactcaatctttaggacctattgctggacatggatttataactacattttgtcttgttggagtttcatatttaatgactattccattaaatggtactccgttacacgcattcccattaccacttttagcagtgctttggggtattactcttggagctatcggttcttcaactggggatgttcactacggtgctgaaagtgaatatcaaaaattcgaatttggtggaggaactcctgtagctattcaaggagatatagttactaaagcaccaatgggagcaaaaaattcccttgatgtaggtaatttctgtgttaaatttggtggacctttaacaggtttatgtttcggtcttgtagtattctttagtttctggaattcagttgtatttggattatacggcggattagttgttggtttcattattgttcttattttaatattaatgaacgacaaattagaaagattcgcaagaaaacaatacggaccatatgaggaagaa

SEQ ID NO: 12136 - DNA, 912 bp, Methanobrevibacter sp.
  source 1..912: mol_type = genomic DNA
atgatcaatttaataaaaaatatggaggaaaaaattatggaccctgtaacattaggtgttgtcgcattaatgggtgcagttgcaactattggtggagctgctgaggatttagaatctgatatcggttctcaaagtaacccaaactctcaagttcaacttgctccgcaaatgggacatttacaccgtatgataaacaaagcggcttctggtgaaccagtcgcttatggtgtttggtgtggtgttgctggatctattgcatatgtattaattatgttaggtttcgtacctattatttcaattgcaatgggatcttgtgtcgctgcttttgttcacgctatttatactgtcacatcccatatgggtaggattgttggtcaatctcaatttgaacagccattatttatggatgtgttaactcaatctttaggacctattgttggtcacggatttataactagcttttgtattgttggaatttcatatttaatgattatcccattaaacggtactacattacatgtattcccattaccactcttagcagtactttggggtattgctcttggagctatcggttcttcaactggggatgttcattacggtgctgaaagtgaatatcaaaagttcgaatttggtggaggaactcctgtagctattcaaggagatattgttactaatgctcctatgggtgcaaaaaactctatggatgtagtaaacttctgtgctaaatttggtggacctttaaccggtttctgttttggtcttgtagtattctttagtttttggaatactgttgtattcggaatttatggtggtttagtcgttggtttcatcattgtcattttattaattattatgaatgacagattagaagtatttgcaagaaaccgttacggaccatatgaggaagat

SEQ ID NO: 12137 - DNA, 915 bp, Methanocella conradii
  source 1..915: mol_type = genomic DNA
atggaacaattggcagttaaccttggtgccttagcgctgatgggcgcatgtgccaccatcgcgggggccgccgaggacctggaatcagactttggttcccagtccaacgcgaactcccaggtgcaactggcgccacaggtaggctatcttcaccgagtgtacaataaagccatatccggtgagccagtagcgtatgggttcctatgcacgacggctgcttcgatcgcatacgctatcgcgttcgtgctggcaggcaacagcgccgcccgcataaacgagttcatcgtggtaggccttattgcgggtgcgaccatcgcatccctgatgtacggtgtatatgcaacaacagcatacatgggcaggttatccggccagaagagatttggccagccgatatacctggacatattgttaacgacaacgccatctattatcgcgcatgcatttattgcagctttgggcataagcgtgttctcgtaccttttgaatatcattatcggacagccattcccgttcccgatactggcaatgctctggggcatcatggcaggcggtatgggctctgcggttggtgatgtccactatggtgcggagaggcagtaccagaacaagccgttcggcgcgggccttgctgcggccaactctggcaagatcatccagaagggtgaggcgggcttgaggaacagcatcgacatcgcaggcttttgcgtcaagcacggcgctccgctcaccgggctgggcctgggcataacggtattcgccgacttgtggaggcacatactcttcatcgaatactggaatggctggggcgcaatggtggccggcctgctaatcgtcctattatgggtgattggcaacaggctactggagatgtggaccaggaatacatacggtccgtacaagtctgcggaggaa

SEQ ID NO: 12138 - DNA, 900 bp, Methanothermococcus thermolithotrophicus
  source 1..900: mol_type = genomic DNA
atggatccgacattaataacccttggggcattagccctagctggtgctgctacaacagtggccggctgtgctgaagacttggaatctgacgtaggttcacagtcaaaccctaactcccaggtccagttaggtcctcagatgggtaatatacacagatacttcaacaaagctatttctggagaacctgtatcatatggtttatatgttgcagttgcaggtgcagttgcatgggccttaatgagtacaaacttaaatgcgatattagcacttgtagtaggttcaggtgttgctgcattagttcatggagcttattcagtaagttcttacttaggaaggattgttggtcagtctaaaaacttcggtcaaccagtttacatggatgttttaataacgcaccttggtcctatagtaggtcacggatttattgcaatattttgtatggctctagccgcatacttggcaagtacagcgttaggaaacccattcccattaccattaattgcgttaatattcggtattacagtaggtgctattggttcatctacaggggatgttcactacggtgctgaaagagaataccaaaaatatttatttggtggaggtattcctgttgcaaaccagggggacatcgatattaaagccgaatatggtataagaaacggtttagattcatcatacttctgttcaagacttggtggtccattaacaggtctctgttttggtttaatcatattcctcgatggatggagaggaattgttggaaatattgtaggtagtgatttaataacaaaatcagtagttgctattttggtaggacttttaattgtaggtgttgcagcatacgctaacagaaaaatcgaggtatatgctagaaacaaatacggtccatacacaaataga

SEQ ID NO: 12139 - DNA, 897 bp, Methanococcus maripaludis
  source 1..897: mol_type = genomic DNA
atggatccaacattgatttctctgggggcattggccctagcaggagcagctgcgactgtttctggttgtgctgaagacttggaatccgacgtcggttcacagtccaaccctaactctcaggttcaattaggtccgcaaatgggcaatattcacagatacttcaacaaggctatatctggggaacctgtatcatacggtttgtatgttgcagttgcaggtaccattgcttgggcactaataaacgcaggattaaacgttgttttagcgataatcgtgggtgcaggtgttgctgcaatcgtacacggtgcttactcagttagtgcattccttggaagaactgtaggtcagtccaaaaagttcggacaacctgtttacatggatgttcttacatcacacataggtccaatcgtaggacacggatttatagctgttttcacaatgactcttgctgcatatttagcaacaacggcattaggaaacccattcccattaccattggtttcattgatcttcggtattactgtaggtgctatcggttcatcaactggtgacgttcactacggtgctgaaagagaataccaaaaatacccattcggtggcggtatccctgttgctaaccaaggtgacatcgatatttacgcagaatatggggtaagaaatggtttagattcttcatacttctgttcaagatttggtggtccacttacaggattatgctttggtttaattatcttcctcgatggctggagaagcattctcggtaacatcatcggtggagacttagtaacaaaaacatcaatcgcacttttagtaggtctcttagtagtggccgttgcagcagttatcaacaggaaactcgaggtatatgctagaaacaaatacggaccatacagaaat

SEQ ID NO: 12140 - DNA, 897 bp, Methanococcus maripaludis
  source 1..897: mol_type = genomic DNA
atggatccaacattgatttctctgggggcattggccctagctggggcggctgcaactgtttcaggttgtgctgaagacttggaatccgatgtcggttcacagtcaaaccctaactctcaggttcaattaggtccgcaaatgggcaatatccacagatactttaacaaagctatatctggggaacctgtatcatacggtttgtatgttgcagttgcaggtaccattgcttgggcactaattaacgcaggattaaacgctgttttagcgataatcgtaggttcaggtgttgctgcagtcgtacacggtgcatactcagttagtgcattccttggaagaactgtaggtcagtccaaaaagttcggacaacctgtttacatggatgttcttacatcacacataggtccaatcgtaggacacggatttatagctgttttcacaatgactcttgctgcatacttagcaacaacagcattaggaaacccattcccactaccattggttgcattaatcttcggtattactgtaggtgctatcggttcatcaactggtgacgttcactacggtgctgaaagagaataccaaaaatacccattcggtggaggtatccctgttgctaaccaaggtgacatcgatatttacgcagaatacggtgtgagaaatggtttagattcttcatatttctgttcaagatttggtggtccacttacaggattatgctttggtttaattatcttcctcgatggatggagaagcattctcggtaacatcatcggtggagacttagtaacaaaaacatcaatcgcacttttagtaggtctcttagtagtggccgttgcagcaggtatcaacaggaaactcgaggtatatgctagaaacaaatacggaccatacagaaat

SEQ ID NO: 12141 - DNA, 897 bp, Methanococcus maripaludis
  source 1..897: mol_type = genomic DNA
atggatccaacattgatttctctgggggcattggccctagcaggagcagctgcgactgtttctggttgtgctgaagacttggaatccgacgtcggttcacagtccaaccctaactctcaggttcaattaggtccgcaaatgggcaatattcacagatacttcaacaaggctatatctggggaacctgtatcatacggtttgtatgttgcagttgcaggtaccattgcttgggcactaataaacgcaggattaaacgttgttttagcgataatcgtgggtgcaggtgttgctgcaatcgtacacggtgcttactcagttagtgcattccttggaagaactgtaggtcagtccaaaaagttcggacaacctgtttacatggatgttcttacatcacacataggtccaatcgtaggacacggatttatagctgttttcacaatgactcttgctgcatatttagcaacaacggcattaggaaacccattcccattaccattggtttcattgatcttcggtattactgtaggtgctatcggttcatcaactggtgacgttcactacggtgctgaaagagaataccaaaaatacccattcggtggaggtatccctgttgctaaccaaggtgacattgatatttacgcagaatacggtgtaagaaatggtttagattcttcatacttctgttcaagatttggtggtccacttacaggattatgctttggtttaattatcttcctcgatggctggagaagcattctcggtaacatcctcggtggagacttagtaacaaaaacatcaatcgcacttttagtaggtctcttagtagtggccgttgcagcagttatcaacaggaaactcgaggtatatgctagaaacaaatacggaccatacagaaat

SEQ ID NO: 12142 - DNA, 897 bp, Methanococcus maripaludis
  source 1..897: mol_type = genomic DNA
atggatccaacattgatttctctgggggcattggccctagctggagcagctgcaactgtttccggttgtgctgaagacttggaatccgatgtcggttcacagtctaaccctaactctcaggttcaattaggtccgcaaatgggcaatattcacagatacttcaacaaagctatatctggggaaccagtatcatatggtttgtatgttgcagttgcaggtactattgcttgggcgctaattaacgcaggattaaatgctgttttagcaataatcgtaggttcaggtgttgctgcaatcgtacatggtgcttattcagttagtgcattccttggaaggattgtaggtcagtccaaaaagttcggacaacctgtttacatggatgttcttacatcacacataggtccaatcgtaggacacggatttatagctgttttcacaatgactcttgctgcatatttagcaacaacagcgttaggaaacccattcccattaccattggttgcattgatcttcggtattactgtaggtgctatcggttcatcaactggtgacgttcactacggtgctgaaagagaataccaaaaatacccattcggtggcggtatccctgttgctaaccaaggtgacattgatatttacgcagaatacggtgtaagaaacggattagattcttcatatttctgttcaagatttggtggtccacttacaggattatgctttggtttaattatcttcctcgatggatggagaagcattctcggtaacatcgtcggtggagacttagtaacaaaaacatcaatcgcacttttagtaggtctcttagtagtggccgttgcagcagttatcaacaggaaactcgaggtatatgctagaaacaaatacggaccatacagaaat

SEQ ID NO: 12143 - DNA, 897 bp, Methanococcus vannielii
  source 1..897: mol_type = genomic DNA
atggatccaacattgatttctctgggggcattagcccttgctggggcagcagcaactgtttcaggttgtgctgaagacttggaatctgatgtaggttcacagtcaaaccctaactctcaggttcaattaggtccccaaatgggcaatattcacagatacttcaacaaagcaatttctggagagcctgtatcgtacggtttgtatgttgcagttgcaggttcagttgcttgggcacttattaacgccggattaaacgctgttttagcattaatcattggttcaggtgtcgctgcaatcgttcacggagcttattcagttagtgcatttttaggaagaactgtaggtcagtcccaaaaattcgggcagcctgtttacatggatgttcttacatcacatattggcccaattgtaggtcatggatttatcgctgttttcacgatggttcttgcagcttacttagcagtaactgctttaggaaacccattcccattgccattagtagcgttaattttcggtattaccgtaggtgcgattggttcatcaacaggtgacgttcattatggtgctgaaagagaataccaaaaatacgcatttggtgggggcattcctgttgctaatcagggtgacatcgatatttatgcagaatacggaattagaaacggtttagactcatcatacttctgttcaagacttggtggtccacttaccggattatgctttggtttaatcatcttcctcgatggatggagaagcatcgtaggtaacattattggtggagacttagtaacaaaaacatcaatcgcacttgtagtaggtctcttagtggtggtcgctgcaatgatcctcaacagaaaaatagaggtatttgctagaaacaagtacggaccatacagaaat

SEQ ID NO: 12144 - DNA, 876 bp, Methanothermus fervidus
  source 1..876: mol_type = genomic DNA
atggaccccgcagtggctagtttaggtattttggcacttacaacagcttctgcaattataggacaaacaattgaggatgtagagaccaatataggatcacaaagtaacccaaattcacaagtacagttagcaccgcagatgggtaatttacatagattttttaataaggcaatagctggagaaccatttgcatatggtacattttgtggagtatctggggcaataacagttgcaatgttatatctacatcttcctgcagttattgcactggcaataggtgcagcaattacaacacttatatggttagcatattcaacaactgcatatttaggtagagtatctggatcagctacttttaatcaaccagtatttttagatatgttaacagagaacttaggaccaatagctggacatgcatttatagtatttttctgtataactggagtagcatacttaatgactttacctgtaaagggatttgcacatccattcccaatacctgtcattgggatgatatggggaatgactataggtgcaataggttcagcagttggcgatgtatactatggagcagaagcggagttcgtacataaaaaatttggaggaggaataccagtagctagtcatggagatataacaagaaagggagtgcttggagctagaagtcctatggaagtaggtaatttcacagttaaatatggatctcctataacaggaatggcatttggattaatagtgcttttcacattttggttcgatatagtgtttgaaaaatggagtatacttgcagcatttcttttcgtaatattgttgatagtaataaataatagattagaaaaacatgcaagagaaaagtatggaccatacaggagggag

SEQ ID NO: 12145 - DNA, 912 bp, Methanosarcina acetivorans
  source 1..912: mol_type = genomic DNA
atggaaccactcataggcatgggagtgctggcacttattggcgtagctgcaaccattgcaggtgcctcagaagacctagaatccgatgtcggatcccagagtaacccgaactcacaggtccagttagctccccaaatgatgtttccgcacagaatatttaacaaagcggtatcaggggaacccccctcaaacgcattgatgtgttcggtcggtgcagccgtcgctacagtattaataagtgaattcactttatctccgctctttgcactggtcttgggtgctcttattgcagcatgtgtccacggtacctttgccgtcacatctacaatgggccgtgcagccagtcagagtcgcttcaaacagccagtttatctggatatgatcagaagccacacccccgtaattatgggatattcgttcataacgactttctgtatccttgtggtgtcatatctgatgaccgttgtactcggacaccccttcccgctaaccatgctggcctttatctggggtattacagtaggtgcaattggctcatccacaggtgacgtccactacggtgcagagcgcgaattccagcagttcgagttcggttccgggctcaacgcttcaaactcgggaaacattgttcgatatggagaatccggggtcagaaacgggtatgacaactcctggttctgtgccaagttcggaggccctgtcacaggtatggcttttggtatgaccgtattccttggaagctgggtaaccactgtttttgatcctgcagtaagcatttccagaggctggatctctgttgttgctggtgtcattattgtccttatcttaattttctggaactggaagattgaagtcaaagcccgtaatgcttacggaccctacaaggaagacaaaaccgaggaggcttcagca

SEQ ID NO: 12146 - DNA, 912 bp, Methanosarcina mazei
  source 1..912: mol_type = genomic DNA
atggaaccactcataggcatgggagtgcttgcacttattggagtggctgcgaccattgcaggtgcttcagaggacctggaatctgacataggttcgcagagcaaccctaactctcaggtgcagttagctccccaaatgatgtttccccacagaatatttaacaaagcgatatctggagaaccaccatccaacgcattaatgtgttcgataggtgcagccattgcgacagtattaataagtgaatttacagtatccccactttttgcactggtatttggttccgttattgcagcatccgtacacgctacttttgcggtaactgctacaatgggcagatgtgccagtcagagtcggttcaagcagccgatttatctggatatgataagaagtcataccccggcaattatgggatatgcgttcataacaaccttttgtgttctaatagtatcgtacttgatgaccgttgtactcgggcaccccttcccgctgactatgctggcttttatctggggtattacaataggtgcaataggatcatcaacaggcgacgtccactacggtgcagagcgcgaattccagcagtttgaatttggttccgggctgaacgcttcaaactcaggtaacattgtaagatatgccgaatccggcctcaggaatgggttcgacaactcctggttctgctcaaagttcggcggacctaccacaggaattgcttttggtatgaccgtattccttggaagctggataaccactatttttgatcctgcacaaggtctgtccatgggatggctttctgtaattgcaggtgttattatcgtccttattttaattatctggaactggaaaatcgaagtacaggcccgcaaagcatatggaccttacaaagaagacaaggctgaggaggcttccgca

SEQ ID NO: 12147 - DNA, 900 bp, Methanothrix harundinacea
  source 1..900: mol_type = genomic DNA; note = strain 6Ac
atggttagcatggggctcctagcagctatgggcgcccttgcgacagtagccggtgcaagcgaggacttagagtccgatgtgggttctcagagcaaccccaactcacaggtccagttggctgcccaggtgggtcacacccacaggatatacaacaaagccatctctggagagcccccatcgaacgctctttacgccgcccttgccgcagttacagctagtgtcttgatgtccgggtatggcatgaacgcgttctttgcgatcgccatcggctcggttatggccgcgatcttcaacggcatcttttctgtcaccgcctacatgggcaggaacacgagccaggcgcggttcaaccagtacgtctacctggacgttctgcggactcacaccaccgccatcatggcacatgcgtacatcactgccttctgcgtagtcaccatctcctacatcatgacagccccgtggcttccgattcagcacccgttcccgttccccctcgtcgccatgatatgggggctcgccatcggagccataggatcgtctacgggagacgtccactatggaggagagagggagtttcagaactacatcttcggggcggggctcaacgccgccaactccggtgacatcgtcaccagggccgaggctggcctgaggagctccatcgacaacgtctggttctgcgcccgattcggaggccccgtcaccgggatggccttcgggctgacggtcttcctggacaactggcggaccaccatcttcgatcccgccacccagggatggtatgcggtcctgaccgggatagtgatcgtcattctgttcatcgtctacaacagaatcctggagatcagagcgagaaagaggtacgggccctatcccgaatacaagggggacattgaggca

SEQ ID NO: 12148 - DNA, 47 bp, synthetic construct
  source 1..47: mol_type = other DNA
gggaaataagagagaaaagaagagtaagaagaaatataagagccacc

SEQ ID NO: 12149 - DNA, 47 bp, synthetic construct
  source 1..47: mol_type = other DNA
gggagatcagagagaaaagaagagtaagaagaaatataagagccacc

SEQ ID NO: 12150 - DNA, 145 bp, synthetic construct
  source 1..145: mol_type = other DNA
ggaataaaagtctcaacacaacatatacaaaacaaacgaatctcaagcaatcaagcattctacttctattgcagcaatttaaatcatttcttttaaagcaaaagcaattttctgaaaattttcaccatttacgaacgatagcaac

SEQ ID NO: 12151 - RNA, 42 nt, synthetic construct
  source 1..42: mol_type = other RNA
gggagacaagcttggcattccggtactgttggtaaagccacc

SEQ ID NO: 12152 - DNA, 47 bp, synthetic construct; identical to SEQ ID NO: 12149
  source 1..47: mol_type = other DNA

SEQ ID NO: 12153 - DNA, 145 bp, synthetic construct; identical to SEQ ID NO: 12150
  source 1..145: mol_type = other DNA

SEQ ID NO: 12154 - RNA, 42 nt, synthetic construct; identical to SEQ ID NO: 12151
  source 1..42: mol_type = other RNA

SEQ ID NO: 12155 - DNA, 47 bp, synthetic construct
  source 1..47: mol_type = other DNA
gggaattaacagagaaaagaagagtaagaagaaatataagagccacc

SEQ ID NO: 12156 - DNA, 47 bp, synthetic construct
  source 1..47: mol_type = other DNA
gggaaattagacagaaaagaagagtaagaagaaatataagagccacc

SEQ ID NO: 12157 - DNA, 47 bp, synthetic construct
  source 1..47: mol_type = other DNA
gggaaataagagagtaaagaacagtaagaagaaatataagagccacc

SEQ ID NO: 12158 - DNA, 47 bp, synthetic construct
  source 1..47: mol_type = other DNA
gggaaaaaagagagaaaagaagactaagaagaaatataagagccacc

SEQ ID NO: 12159 - DNA, 47 bp, synthetic construct
  source 1..47: mol_type = other DNA
gggaaataagagagaaaagaagagtaagaagatatataagagccacc

SEQ ID NO: 12160 - DNA, 47 bp, synthetic construct
  source 1..47: mol_type = other DNA
gggaaataagagacaaaacaagagtaagaagaaatataagagccacc

SEQ ID NO: 12161 - DNA, 47 bp, synthetic construct
  source 1..47: mol_type = other DNA
gggaaattagagagtaaagaacagtaagtagaattaaaagagccacc

SEQ ID NO: 12162 - DNA, 47 bp, synthetic construct
  source 1..47: mol_type = other DNA
gggaaataagagagaatagaagagtaagaagaaatataagagccacc

SEQ ID NO: 12163 - DNA, 47 bp, synthetic construct
  source 1..47: mol_type = other DNA
gggaaataagagagaaaagaagagtaagaagaaaattaagagccacc

SEQ ID NO: 12164 - DNA, 47 bp, synthetic construct
  source 1..47: mol_type = other DNA
gggaaataagagagaaaagaagagtaagaagaaatttaagagccacc

SEQ ID NO: 12165 - DNA, 371 bp, Homo sapiens
  source 1..371: mol_type = genomic DNA
gcgcctgcccacctgccaccgactgctggaacccagccagtgggagggcctggcccaccagagtcctgctccctcactcctcgccccgccccctgtcccagagtcccacctgggggctctctccacccttctcagagttccagtttcaaccagagttccaaccaatgggctccatcctctggattctggccaatgaaatatctccctggcagggtcctcttcttttcccagagctccaccccaaccaggagctctagttaatggagagctcccagcacactcggagcttgtgctttgtctccacgcaaagcgataaataaaagcattggtggcctttggtctttgaataaagcctgagtaggaagtctaga

SEQ ID NO: 12166 - DNA, 568 bp, Homo sapiens
  source 1..568: mol_type = genomic DNA
gcccctgccgctcccacccccacccatctgggccccgggttcaagagagagcggggtctgatctcgtgtagccatatagagtttgcttctgagtgtctgctttgtttagtagaggtgggcaggaggagctgaggggctggggctggggtgttgaagttggctttgcatgcccagcgatgcgcctccctgtgggatgtcatcaccctgggaaccgggagtggcccttggctcactgtgttctgcatggtttggatctgaattaattgtcctttcttctaaatcccaaccgaacttcttccaacctccaaactggctgtaaccccaaatccaagccattaactacacctgacagtagcaattgtctgattaatcactggccccttgaagacagcagaatgtccctttgcaatgaggaggagatctgggctgggcgggccagctggggaagcatttgactatctggaacttgtgtgtgcctcctcaggtatggcagtgactcacctggttttaataaaacaacctgcaacatctcatggtctttgaataaagcctgagtaggaagtctaga

SEQ ID NO: 12167 - DNA, 289 bp, Homo sapiens
  source 1..289: mol_type = genomic DNA
acacactccacctccagcacgcgacttctcaggacgacgaatcttctcaatgggggggcggctgagctccagccaccccgcagtcactttctttgtaacaacttccgttgctgccatcgtaaactgacacagtgtttataacgtgtacatacattaacttattacctcattttgttatttttcgaaacaaagccctgtggaagaaaatggaaaacttgaagaagcattaaagtcattctgttaagctgcgtaaatggtctttgaataaagcctgagtaggaagtctaga

SEQ ID NO: 12168 - DNA, 379 bp, Homo sapiens
  source 1..379: mol_type = genomic DNA
catcacatttaaaagcatctcagcctaccatgagaataagagaaagaaaatgaagatcaaaagcttattcatctgtttttctttttcgttggtgtaaagccaacaccctgtctaaaaaacataaatttctttaatcattttgcctcttttctctgtgcttcaattaataaaaaatggaaagaatctaatagagtggtacagcactgttatttttcaaagatgtgttgctatcctgaaaattctgtaggttctgtggaagttccagtgttctctcttattccacttcggtagaggatttctagtttcttgtgggctaattaaataaatcattaatactcttctaatggtctttgaataaagcctgagtaggaagtctaga

SEQ ID NO: 12169 - DNA, 118 bp, Homo sapiens
  source 1..118: mol_type = genomic DNA
gctgccttctgcggggcttgccttctggccatgcccttcttctctcccttgcacctgtacctcttggtctttgaataaagcctgagtaggaaggcggccgctcgagcatgcatctaga

SEQ ID NO: 12170 - DNA, 908 bp, Homo sapiens
  source 1..908: mol_type = genomic DNA
gccaagccctccccatcccatgtatttatctctatttaatatttatgtctatttaagcctcatatttaaagacagggaagagcagaacggagccccaggcctctgtgtccttccctgcatttctgagtttcattctcctgcctgtagcagtgagaaaaagctcctgtcctcccatcccctggactgggaggtagataggtaaataccaagtatttattactatgactgctccccagccctggctctgcaatgggcactgggatgagccgctgtgagcccctggtcctgagggtccccacctgggacccttgagagtatcaggtctcccacgtgggagacaagaaatccctgtttaatatttaaacagcagtgttccccatctgggtccttgcacccctcactctggcctcagccgactgcacagcggcccctgcatccccttggctgtgaggcccctggacaagcagaggtggccagagctgggaggcatggccctggggtcccacgaatttgctggggaatctcgtttttcttcttaagacttttgggacatggtttgactcccgaacatcaccgacgcgtctcctgtttttctgggtggcctcgggacacctgccctgcccccacgagggtcaggactgtgactctttttagggccaggcaggtgcctggacatttgccttgctggacggggactggggatgtgggagggagcagacaggaggaatcatgtcaggcctgtgtgtgaaaggaagctccactgtcaccctccacctcttcaccccccactcaccagtgtcccctccactgtcacattgtaactgaacttcaggataataaagtgtttgcctccatggtctttgaataaagcctgagtaggaaggcggccgctcgagcatgcatctaga

SEQ ID NO: 12171 - DNA, 835 bp, Homo sapiens
  source 1..835: mol_type = genomic DNA
actcaatctaaattaaaaaagaaagaaatttgaaaaaactttctctttgccatttcttcttcttcttttttaactgaaagctgaatccttccatttcttctgcacatctacttgcttaaattgtgggcaaaagagaaaaagaaggattgatcagagcattgtgcaatacagtttcattaactccttcccccgctcccccaaaaatttgaatttttttttcaacactcttacacctgttatggaaaatgtcaacctttgtaagaaaaccaaaataaaaattgaaaaataaaaaccataaacatttgcaccacttgtggcttttgaatatcttccacagagggaagtttaaaacccaaacttccaaaggtttaaactacctcaaaacactttcccatgagtgtgatccacattgttaggtgctgacctagacagagatgaactgaggtccttgttttgttttgttcataatacaaaggtgctaattaatagtatttcagatacttgaagaatgttgatggtgctagaagaatttgagaagaaatactcctgtattgagttgtatcgtgtggtgtattttttaaaaaatttgatttagcattcatattttccatcttattcccaattaaaagtatgcagattatttgcccaaatcttcttcagattcagcatttgttctttgccagtctcattttcatcttcttccatggttccacagaagctttgtttcttgggcaagcagaaaaattaaattgtacctattttgtatatgtgagatgtttaaataaattgtgaaaaaaatgaaataaagcatgtttggttttccaaaagaacatat

SEQ ID NO: 12172 - DNA, 297 bp, Homo sapiens
  source 1..297: mol_type = genomic DNA
cgccgccgcccgggccccgcagtcgagggtcgtgagcccaccccgtccatggtgctaagcgggcccgggtcccacacggccagcaccgctgctcactcggacgacgccctgggcctgcacctctccagctcctcccacggggtccccgtagccccggcccccgcccagccccaggtctccccaggccctccgcaggctgcccggcctccctccccctgcagccatcccaaggctcctgacctacctggcccctgagctctggagcaagccctgacccaataaaggctttgaacccat

SEQ ID NO: 12173 - DNA, 602 bp, Homo sapiens
  source 1..602: mol_type = genomic DNA
ggggctagagccctctccgcacagcgtggagacggggcaaggaggggggttattaggattggtggttttgttttgctttgtttaaagccgtgggaaaatggcacaactttacctctgtgggagatgcaacactgagagccaaggggtgggagttgggataatttttatataaaagaagtttttccactttgaattgctaaaagtggcatttttcctatgtgcagtcactcctctcatttctaaaatagggacgtggccaggcacggtggctcatgcctgtaatcccagcactttgggaggccgaggcaggcggctcacgaggtcaggagatcgagactatcctggctaacacggtaaaaccctgtctctactaaaagtacaaaaaattagctgggcgtggtggtgggcacctgtagtcccagctactcgggaggctgaggcaggagaaaggcatgaatccaagaggcagagcttgcagtgagctgagatcacgccattgcactccagcctgggcaacagtgttaagactctgtctcaaatataaataaataaataaataaataaataaataaataaaaataaagcgagatgttgccctcaaa

SEQ ID NO: 12174 - DNA, 785 bp, Homo sapiens
  source 1..785: mol_type = genomic DNA
ggccctgccccgtcggactgcccccagaaagcctcctgccccctgccagtgaagtccttcagtgagcccctccccagccagcccttccctggccccgccggatgtataaatgtaaaaatgaaggaattacattttatatgtgagcgagcaagccggcaagcgagcacagtattatttctccatcccctccctgcctgctccttggcacccccatgctgccttcagggagacaggcagggagggcttggggctgcacctcctaccctcccaccagaacgcaccccactgggagagctggtggtgcagccttcccctccctgtataagacactttgccaaggctctcccctctcgccccatccctgcttgcccgctcccacagcttcctgagggctaattctgggaagggagagttctttgctgcccctgtctggaagacgtggctctgggtgaggtaggcgggaaaggatggagtgttttagttcttgggggaggccaccccaaaccccagccccaactccaggggcacctatgagatggccatgctcaacccccctcccagacaggccctccctgtctccagggcccccaccgaggttcccagggctggagacttcctctggtaaacattcctccagcctcccctcccctggggacgccaaggaggtgggccacacccaggaagggaaagcgggcagccccgttttggggacgtgaacgttttaataatttttgctgaattcctttacaactaaataacacagatattgttataaataaaattgt

SEQ ID NO: 12175 - DNA, 3001 bp, Homo sapiens
  source 1..3001: mol_type = genomic DNA
atattaaggatcaagctgttagctaataatgccacctctgcagttttgggaacaggcaaataaagtatcagtatacatggtgatgtacatctgtagcaaagctcttggagaaaatgaagactgaagaaagcaaagcaaaaactgtatagagagatttttcaaaagcagtaatccctcaattttaaaaaaggattgaaaattctaaatgtctttctgtgcatattttttgtgttaggaatcaaaagtattttataaaaggagaaagaacagcctcattttagatgtagtcctgttggattttttatgcctcctcagtaaccagaaatgttttaaaaaactaagtgtttaggatttcaagacaacattatacatggctctgaaatatctgacacaatgtaaacattgcaggcacctgcattttatgttttttttttcaacaaatgtgactaatttgaaacttttatgaacttctgagctgtccccttgcaattcaaccgcagtttgaattaatcatatcaaatcagttttaattttttaaattgtacttcagagtctatatttcaagggcacattttctcactactattttaatacattaaaggactaaataatctttcagagatgctggaaacaaatcatttgctttatatgtttcattagaataccaatgaaacatacaacttgaaaattagtaatagtatttttgaagatcccatttctaattggagatctctttaatttcgatcaacttataatgtgtagtactatattaagtgcacttgagtggaattcaacatttgactaataaaatgagttcatcatgttggcaagtgatgtggcaattatctctggtgacaaaagagtaaaatcaaatatttctgcctgttacaaatatcaaggaagacctgctactatgaaatagatgacattaatctgtcttcactgtttataatacggatggattttttttcaaatcagtgtgtgttttgaggtcttatgtaattgatgacatttgagagaaatggtggctttttttagctacctctttgttcatttaagcaccagtaaagatcatgtctttttatagaagtgtagattttctttgtgactttgctatcgtgcctaaagctctaaatataggtgaatgtgtgatgaatactcagattatttgtctctctatataattagtttggtactaagtttctcaaaaaattattaacacatgaaagacaatctctaaaccagaaaaagaagtagtacaaattttgttactgtaatgctcgcgtttagtgagtttaaaacacacagtatcttttggttttataatcagtttctattttgctgtgcctgagattaagatctgtgtatgtgtgtgtgtgtgtgtgtgcgtttgtgtgttaaagcagaaaagacttttttaaaagttttaagtgataaatgcaatttgttaattgatcttagatcactagtaaactcagggctgaattataccatgtatattctattagaagaaagtaaacaccatctttattcctgccctttttcttctctcaaagtagttgtagttatatctagaaagaagcaattttgatttcttgaaaaggtagttcctgcactcagtttaaactaaaaataatcatacttggattttatttatttttgtcatagtaaaaattttaatttatatatatttttatttagtattatcttattctttgctatttgccaatcctttgtcatcaattgtgttaaatgaattgaaaattcatgccctgttcattttattttactttattggttaggatatttaaaggatttttgtatatataatttcttaaattaatattccaaaaggttagtggacttagattataaattatggcaaaaatctaaaaacaacaaaaatgatttttatacattctatttcattattcctctttttccaataagtcatacaattggtagatatgacttattttatttttgtattattcactatatctttatgatatttaagtataaataattaaaaaaatttattgtaccttatagtctgtcaccaaaaaaaaaaaattatctgtaggtagtgaaatgctaatgttgatttgtctttaagggcttgttaactatcctttattttctcatttgtcttaaattaggagtttgtgtttaaattactcatctaagcaaaaaatgtatataaatcccattactgggtatatacccaaaggattataaatcatgctgctataaagacacatgcacacgtatgtttattgcagcactattcacaatagcaaagacttggaaccaacccaaatgtccatcaatgatagacttgattaagaaaatgtgcacatatacaccatggaatactatgcagccataaaaaaggatgagttcatgtcctttgtagggacatggataaagctggaaaccatcattctgagcaaactattgcaaggacagaaaaccaaacactgcatgttctcactcataggtgggaattgaacaatgagaacacttggacacaaggtggggaacaccacacaccagggcctgtcatggggtggggggagtggggagggatagcattaggagatatacctaatgtaaatgatgagttaatgggtgcagcacaccaacatggcacatgtatacatatgtagcaaacctgcacgttgtgcacatgtaccctagaacttaaagtataattaaaaaaaaaaagaaaacagaagctatttataaagaagttatttgctgaaataaatgtgatctttcccattaaaaaaataaagaaattttggggtaaaaaaacacaatatattgtattcttgaaaaattctaagagagtggatgtgaagtgttctcaccacaaaagtgataactaattgaggtaatgcacatattaattagaaagattttgtcattccacaatgtatatatacttaaaaatatgttatacacaataaatacatacattaaaaaataagtaaatgta

SEQ ID NO: 12176 - DNA, 1037 bp, Homo sapiens
  source 1..1037: mol_type = genomic DNA
cccaccctgcacgccggcaccaaaccctgtcctcccacccctccccactcatcactaaacagagtaaaatgtgatgcgaattttcccgaccaacctgattcgctagattttttttaaggaaaagcttggaaagccaggacacaacgctgctgcctgctttgtgcagggtcctccggggctcagccctgagttggcatcacctgcgcagggccctctggggctcagccctgagctagtgtcacctgcacagggccctctgaggctcagccctgagctggcgtcacctgtgcagggccctctggggctcagccctgagctggcctcacctgggttccccaccccgggctctcctgccctgccctcctgcccgccctccctcctgcctgcgcagctccttccctaggcacctctgtgctgcatcccaccagcctgagcaagacgccctctcggggcctgtgccgcactagcctccctctcctctgtccccatagctggtttttcccaccaatcctcacctaacagttactttacaattaaactcaaagcaagctcttctcctcagcttggggcagccattggcctctgtctcgttttgggaaaccaaggtcaggaggccgttgcagacataaatctcggcgactcggccccgtctcctgagggtcctgctggtgaccggcctggaccttggccctacagccctggaggccgctgctgaccagcactgaccccgacctcagagagtactcgcaggggcgctggctgcactcaagaccctcgagattaacggtgctaaccccgtctgctcctccctcccgcagagactggggcctggactggacatgagagccccttggtgccacagagggctgtgtcttactagaaacaacgcaaacctctccttcctcagaatagtgatgtgttcgacgttttatcaaaggccccctttctatgttcatgttagttttgctccttctgtgtttttttctgaaccatatccatgttgctgacttttccaaataaaggttttcactcctctc

SEQ ID NO: 12177 - DNA, 577 bp, Homo sapiens
  source 1..577: mol_type = genomic DNA
agaggcctgcctccagggctggactgaggcctgagcgctcctgccgcagagctggccgcgccaaataatgtctctgtgagactcgagaactttcatttttttccaggctggttcggatttggggtggattttggttttgttcccctcctccactctcccccaccccctccccgcccttttttttttttttttttaaactggtattttatctttgattctccttcagccctcacccctggttctcatctttcttgatcaacatcttttcttgcctctgtccccttctctcatctcttagctcccctccaacctggggggcagtggtgtggagaagccacaggcctgagatttcatctgctctccttcctggagcccagaggagggcagcagaagggggtggtgtctccaaccccccagcactgaggaagaacggggctcttctcatttcacccctccctttctcccctgcccccaggactgggccacttctgggtggggcagtgggtcccagattggctcacactgagaatgtaagaactacaaacaaaatttctattaaattaaattttgtgtctcc

SEQ ID NO: 12178 - DNA, 2212 bp, Homo sapiens
  source 1..2212: mol_type = genomic DNA
ctccctccatcccaacctggctccctcccacccaaccaactttccccccaacccggaaacagacaagcaacccaaactgaaccccctcaaaagccaaaaaatgggagacaatttcacatggactttggaaaatatttttttcctttgcattcatctctcaaacttagtttttatctttgaccaaccgaacatgaccaaaaaccaaaagtgcattcaaccttaccaaaaaaaaaaaaaaaaaaagaataaataaataactttttaaaaaaggaagcttggtccacttgcttgaagacccatgcgggggtaagtccctttctgcccgttgggcttatgaaaccccaatgctgccctttctgctcctttctccacaccccccttggggcctcccctccactccttcccaaatctgtctccccagaagacacaggaaacaatgtattgtctgcccagcaatcaaaggcaatgctcaaacacccaagtggcccccaccctcagcccgctcctgcccgcccagcacccccaggccctgggggacctggggttctcagactgccaaagaagccttgccatctggcgctcccatggctcttgcaacatctccccttcgtttttgagggggtcatgccgggggagccaccagcccctcactgggttcggaggagagtcaggaagggccacgacaaagcagaaacatcggatttggggaacgcgtgtcaatcccttgtgccgcagggctgggcgggagagactgttctgttccttgtgtaactgtgttgctgaaagactacctcgttcttgtcttgatgtgtcaccggggcaactgcctgggggcggggatgggggcagggtggaagcggctccccattttataccaaaggtgctacatctatgtgatgggtggggtggggagggaatcactggtgctatagaaattgagatgcccccccaggccagcaaatgttcctttttgttcaaagtctatttttattccttgatatttttctttttttttttttttttttgtggatggggacttgtgaatttttctaaaggtgctatttaacatgggaggagagcgtgtgcggctccagcccagcccgctgctcactttccaccctctctccacctgcctctggcttctcaggcctctgctctccgacctctctcctctgaaaccctcctccacagctgcagcccatcctcccggctccctcctagtctgtcctgcgtcctctgtccccgggtttcagagacaacttcccaaagcacaaagcagtttttccccctaggggtgggaggaagcaaaagactctgtacctattttgtatgtgtataataatttgagatgtttttaattattttgattgctggaataaagcatgtggaaatgacccaaacataatccgcagtggcctcctaatttccttctttggagttgggggaggggtagacatggggaaggggctttggggtgatgggcttgccttccattcctgccctttccctccccactattctcttctagatccctccataaccccactcccctttctctcacccttcttataccgcaaacctttctacttcctctttcattttctattcttgcaatttccttgcaccttttccaaatcctcttctcccctgcaataccatacaggcaatccacgtgcacaacacacacacacactcttcacatctggggttgtccaaacctcatacccactccccttcaagcccatccactctccaccccctggatgccctgcacttggtggcggtgggatgctcatggatactgggagggtgaggggagtggaacccgtgaggaggacctgggggcctctccttgaactgacatgaagggtcatctggcctctgctcccttctcacccacgctgacctcctgccgaaggagcaacgcaacaggagaggggtctgctgagcctggcgagggtctgggagggaccaggaggaaggcgtgctccctgctcgctgtcctggccctgggggagtgagggagacagacacctgggagagctgtggggaaggcactcgcaccgtgctcttgggaaggaaggagacctggccctgctcaccacggactgggtgcctcgacctcctgaatccccagaacacaacccccctgggctggggtggtctggggaaccatcgtgcccccgcctcccgcctactcctttttaagctt

SEQ ID NO: 12179 - DNA, 729 bp, Homo sapiens
  source 1..729: mol_type = genomic DNA
ttggccaggcctgaccctcttggacctttcttctttgccgacaaccactgcccagcagcctctgggacctcggggtcccagggaacccagtccagcctcctggctgttgacttcccattgctcttggagccaccaatcaaagagattcaaagagattcctgcaggccagaggcggaacacacctttatggctggggctctccgtggtgttctggacccagcccctggagacaccattcacttttactgctttgtagtgactcgtgctctccaacctgtcttcctgaaaaaccaaggcccccttcccccacctcttccatggggtgagacttgagcagaacaggggcttccccaagttgcccagaaagactgtctgggtgagaagccatggccagagcttctcccaggcacaggtgttgcaccagggacttctgcttcaagttttggggtaaagacacctggatcagactccaagggctgccctgagtctgggacttctgcctccatggctggtcatgagagcaaaccgtagtcccctggagacagcgactccagagaacctcttgggagacagaagaggcatctgtgcacagctcgatcttctacttgcctgtggggaggggagtgacaggtccacacaccacactgggtcaccctgtcctggatgcctctgaagagagggacagaccgtcagaaactggagagtttctattaaaggtcatttaaacca

SEQ ID NO: 12180 - DNA, 847 bp, Homo sapiens
  source 1..847: mol_type = genomic DNA
tcctccgggaccccagccctcaggattcctgatgctccaaggcgactgatgggcgctggatgaagtggcacagtcagcttccctgggggctggtgtcatgttgggctcctggggcgggggcacggcctggcatttcacgcattgctgccaccccaggtccacctgtctccactttcacagcctccaagtctgtggctcttcccttctgtcctccgaggggcttgccttctctcgtgtccagtgaggtgctcagtgatcggcttaacttagagaagcccgccccctccccttctccgtctgtcccaagagggtctgctctgagcctgcgttcctaggtggctcggcctcagctgcctgggttgtggccgccctagcatcctgtatgcccacagctactggaatccccgctgctgctccgggccaagcttctggttgattaatgagggcatggggtggtccctcaagaccttcccctaccttttgtggaaccagtgatgcctcaaagacagtgtcccctccacagctgggtgccaggggcaggggatcctcagtatagccggtgaaccctgataccaggagcctgggcctccctgaacccctggcttccagccatctcatcgccagcctcctcctggacctcttggcccccagccccttccccacacagccccagaagggtcccagagctgaccccactccaggacctaggcccagcccctcagcctcatctggagcccctgaagaccagtcccacccacctttctggcctcatctgacactgctccgcatcctgctgtgtgtcctgttccatgttccggttccatccaaatacactttctggaacaaa

SEQ ID NO: 12181 - DNA, 110 bp, Homo sapiens
  source 1..110: mol_type = genomic DNA
gctggagcctcggtggccatgcttcttgccccttgggcctccccccagcccctcctccccttcctgcacccgtacccccgtggtctttgaataaagtctgagtgggcggc

SEQ ID NO: 12182 - protein, 14 aa, Bos taurus
MITLLFLLVVGAQA

SEQ ID NO: 12183 - protein, 15 aa, Bos taurus
MKFFIFTCLLAVALA

SEQ ID NO: 12184 - protein, 15 aa, Bos taurus
MKVLILACLVALALA

SEQ ID NO: 12185 - protein, 15 aa, Bos taurus
MKLLILTCLVAVALA

SEQ ID NO: 12186 - protein, 15 aa, Bos taurus
MRLLVLAALLTVGAG

SEQ ID NO: 12187 - protein, 16 aa, Bos taurus
MQGLLILSVLLGAALG

SEQ ID NO: 12188 - protein, 16 aa, Bos taurus
MKTVLILLSILGMACA

SEQ ID NO: 12189 - protein, 16 aa, Bos taurus
MKAVFLTLLFGLVCTA

SEQ ID NO: 12190 - protein, 16 aa, Bos taurus
MKCLLLALALTCGAQA

SEQ ID NO: 12191 - protein, 16 aa, Bos taurus
MFIFIFLSLWTLLVMG

SEQ ID NO: 12192 - protein, 16 aa, Bos taurus
MLGITVFTTFLAYASS

SEQ ID NO: 12193 - protein, 16 aa, Bos taurus
MGTWILFACLLGAAFS

SEQ ID NO: 12194 - protein, 16 aa, Bos taurus
MGTWILFACLLGAAYS

SEQ ID NO: 12195 - protein, 16 aa, Bos taurus
MRIAVICFCLLGIASA

SEQ ID NO: 12196 - protein, 16 aa, Bos taurus
MRCLVVLLAVFALSQG

SEQ ID NO: 12197 - protein, 17 aa, Bos taurus
MRAWIFFLLCLAGRALA

SEQ ID NO: 12198 - protein, 17 aa, Bos taurus
MVRKWALLLPMLLCGLT

SEQ ID NO: 12199 - protein, 17 aa, Bos taurus
MKTFIFLALLGAAVAFP

SEQ ID NO: 12200 - protein, 17 aa, Bos taurus
MWLQNLLLLGTVVCSFS

SEQ ID NO: 12201 - protein, 17 aa, Bos taurus
MRAASLFLLFLPAGLLA

SEQ ID NO: 12202 - protein, 17 aa, Bos taurus
MLLPVPLLLGLLGLAAA

SEQ ID NO: 12203 - protein, 17 aa, Bos taurus
MISPFLLLAIGTCFASS

SEQ ID NO: 12204 - protein, 17 aa, Bos taurus
MWLQLLLLLLAPQGGHG

SEQ ID NO: 12205 - protein, 17 aa, Bos taurus
MLLQGALLLLLALPSHG

SEQ ID NO: 12206 - protein, 18 aa, Bos taurus
LLLCVGLLLVLKHHDGAA

SEQ ID NO: 12207 - protein, 18 aa, Bos taurus
MKLITILFLCSRLLPSLT

SEQ ID NO: 12208 - protein, 18 aa, Bos taurus
MKTLLLLMGLLLSWESGW

SEQ ID NO: 12209 - protein, 18 aa, Bos taurus
MFSTGTLLLAALISPALA

SEQ ID NO: 12210 - protein, 18 aa, Bos taurus
MDLTLLWVLLPLVTVAWG

SEQ ID NO: 12211 - protein, 18 aa, Bos taurus
MRFPAKIVWLVLWTVCVA

SEQ ID NO: 12212 - protein, 18 aa, Bos taurus
MKLFTGLILCSLVLGVHS

SEQ ID NO: 12213 - protein, 18 aa, Bos taurus
MRSAAVLALLLCAGQVIA

SEQ ID NO: 12214 - protein, 18 aa, Bos taurus
MPPLWVVLALGCLRLGSG

SEQ ID NO: 12215 - protein, 18 aa, Bos taurus
MKWVTFISLLLLFSSAYS

SEQ ID NO: 12216 - protein, 18 aa, Bos taurus
MPRLPLLLLLLWGTGSHG

SEQ ID NO: 12217 - protein, 18 aa, Bos taurus
MPCPRLLAALFCSSGLFA

SEQ ID NO: 12218 - protein, 18 aa, Bos taurus
MLPQTALLLLMSLNLVHG

SEQ ID NO: 12219 - protein, 18 aa, Bos taurus
MKFLCVLLLASLAATSLA

SEQ ID NO: 12220 - protein, 18 aa, Bos taurus
MNLGVFPLLLALIGGASS

SEQ ID NO: 12221 - protein, 18 aa, Bos taurus
MKAVVLTLAVLFLTGSQA

SEQ ID NO: 12222 - protein, 18 aa, Bos taurus
MKSFVLLFCLAQLWGCHS

SEQ ID NO: 12223 - protein, 18 aa, Bos taurus
MDSLAGLVLCGVSLLLSA

SEQ ID NO: 12224 - protein, 18 aa, Bos taurus
LGASRLGPSPGCLAVASA

SEQ ID NO: 12225 - protein, 18 aa, Bos taurus
MGHLGALLFLLGGLGALA

SEQ ID NO: 12226 - protein, 18 aa, Bos taurus
MKALVILGFLFLSVAVQG

SEQ ID NO: 12227 - protein, 19 aa, Bos taurus
MRALLLLGALLVSLESTVS

SEQ ID NO: 12228 - protein, 19 aa, Bos taurus
MPDATLPACFLSLLAFTSA

SEQ ID NO: 12229 - protein, 19 aa, Bos taurus
MAGSSLACCLLGLLALTSA

SEQ ID NO: 12230 - protein, 19 aa, Bos taurus
MRLCLFLCLVLLGPRMATL

SEQ ID NO: 12231 - protein, 19 aa, Bos taurus
MALALWVFGLLDLICLASA

SEQ ID NO: 12232 - protein, 19 aa, Bos taurus
MLQTKNLIWTLFFLGTAVS

SEQ ID NO: 12233 - protein, 19 aa, Bos taurus
MKLFVPALLSLGALGLCLA

SEQ ID NO: 12234 - protein, 19 aa, Bos taurus
MKALARLIVGLLILDAAVT

SEQ ID NO: 12235 - protein, 19 aa, Bos taurus
MQGACVLLLLGLHLQLSLG

SEQ ID NO: 12236 - protein, 19 aa, Bos taurus
MAWQMTQLLLLALVAAAWG

SEQ ID NO: 12237 - protein, 19 aa, Bos taurus
MPPPALVLLLGFLCHVAIA

SEQ ID NO: 12238 - protein, 19 aa, Bos taurus
MKSLLLLSILAALAVAALC

SEQ ID NO: 12239 - protein, 19 aa, Bos taurus
MRFLTVAFLFLALSASALA

SEQ ID NO: 12240 - protein, 19 aa, Bos taurus
MMSFVSLLLVGILFHATQA

SEQ ID NO: 12241 - protein, 19 aa, Bos taurus
MFSVRDLCLVLSLVGAIKT

SEQ ID NO: 12242 - protein, 20 aa, Bos taurus
MNRGVCLCLLMAVLAAGALA

SEQ ID NO: 12243 - protein, 20 aa, Bos taurus
MKSLYFVAGLFVMLVQGSWQ

SEQ ID NO: 12244 - protein, 20 aa, Bos taurus
MLRRALLCLALTALFRAGAG

SEQ ID NO: 12245 - protein, 20 aa, Bos taurus
MLLLPLSVLLLLTQPWRSLG

SEQ ID NO: 12246 - protein, 20 aa, Bos taurus
MQALVLLLWTGALLGFGRCQ

SEQ ID NO: 12247 - protein, 20 aa, Bos taurus
MQPAALLGLLGATVVAAVSS

SEQ ID NO: 12248 - protein, 20 aa, Bos taurus
MEPRPLLLLLGLCSAGLVLG

SEQ ID NO: 12249 - protein, 20 aa, Bos taurus
MPLLSLSLLLLLLQVPAGSA

SEQ ID NO: 12250 - protein, 20 aa, Bos taurus
MPLLWLRGFLLASCWIIVRS

SEQ ID NO: 12251 - protein, 20 aa, Bos taurus
MAGALLCALLLLQLLGRGEG

SEQ ID NO: 12252 - protein, 20 aa, Bos taurus
MEMFQGLLLWLLLGVAGVWA

SEQ ID NO: 12253 - protein, 20 aa, Bos taurus
MRVLLACLLVCALVVSDSDG

SEQ ID NO: 12254 - protein, 20 aa, Bos taurus
MTATFLMSMIFGLACGQAMS

SEQ ID NO: 12255 - protein, 20 aa, Bos taurus
MLPLPLSILLLLTQSQSFLG

SEQ ID NO: 12256 - protein, 20 aa, Bos taurus
MKLSSVIPWALLLSTATVDS

SEQ ID NO: 12257 - protein, 20 aa, Bos taurus
MARFVALVLLGLLSLSGLDA

SEQ ID NO: 12258 - protein, 21 aa, Bos taurus
MSAWAALLLLWGLSLSPVTEQ

SEQ ID NO: 12259 - protein, 21 aa, Bos taurus
MAKLIFLTGLAFLLNAQLGSA

SEQ ID NO: 12260 - protein, 21 aa, Bos taurus
MEGSVLTLVLLAALVVCGSWG

SEQ ID NO: 12261 - protein, 21 aa, Bos taurus
MDRRPLTWALVLLGPALAIAL

SEQ ID NO: 12262 - protein, 21 aa, Bos taurus
MGLRAAHTGFVVLVLLQSCAA

SEQ ID NO: 12263 - protein, 21 aa, Bos taurus
MMKSFFLVVTILALTLPFLGA

SEQ ID NO: 12264 - protein, 21 aa, Bos taurus
MTHRCLLQMVLLLCFSTTALS

SEQ ID NO: 12265 - protein, 21 aa, Bos taurus
MQRLCAHVLILVLALAAFCEA

SEQ ID NO: 12266 - protein, 21 aa, Bos taurus
MRVSLAALAFLLTLAVLHSEA

SEQ ID NO: 12267 - protein, 21 aa, Bos taurus
MWATHGLAVALALSVLPASRA

SEQ ID NO: 12268 - protein, 21 aa, Bos taurus
MTYRCLLPMVLLLCFSTTALS

SEQ ID NO: 12269 - protein, 21 aa, Bos taurus
MSRRYTPLAWVLLALLGLGAA

SEQ ID NO: 12270 - protein, 21 aa, Bos taurus
MTYRCLLQMVLLLCFSTTALS

SEQ ID NO: 12271 - protein, 21 aa, Bos taurus
MEPSLLMWRFFVFIVVPGCVT

SEQ ID NO: 12272 - protein, 22 aa, Bos taurus
MRLHHLLLALLFLVLSAGSGIS

SEQ ID NO: 12273 - protein, 22 aa, Bos taurus
MGTRYFLVGFLILLVLGFEVQG

SEQ ID NO: 12274 - protein, 22 aa, Bos taurus
MRGTRLMGLLLALAGLLQLGLS

SEQ ID NO: 12275 - protein, 22 aa, Bos taurus
MCGGQRPLFLLPLLAVCLGAKG

SEQ ID NO: 12276 - protein, 22 aa, Bos taurus
MALLWGLLALILSCLSSLCSAQ

SEQ ID NO: 12277 - protein, 22 aa, Bos taurus
MKAVGAWLLCLLLLGLALQGAA

SEQ ID NO: 12278 - protein, 22 aa, Bos taurus
MRLHHLLLLLLLVVLSSGSGFT

SEQ ID NO: 12279 - protein, 22 aa, Bos taurus
MRLHHLLLVLLFLVLSAGSGFT

SEQ ID NO: 12280 - protein, 22 aa, Bos taurus
MTPDIQAPFLSLLLLFPVLTVA

SEQ ID NO: 12281 - protein, 22 aa, Bos taurus
MAAGAVVGAWMLVLSLGGTVTG

SEQ ID NO: 12282 - protein, 22 aa, Bos taurus
MRLHHLLLALLFLVLSAGSGFT

SEQ ID NO: 12283 - protein, 22 aa, Bos taurus
MRLHHLLLAVLFLVLSAGSGFT

SEQ ID NO: 12284 - protein, 23 aa, Bos taurus
MRMSPVFACLALGLALIFGEGSA

SEQ ID NO: 12285 - protein, 23 aa, Bos taurus
MAPAWSFLLSLLLLSCNAICSLG

SEQ ID NO: 12286 - protein, 23 aa, Bos taurus
MVWLEPPLLLPIFFLASHVGAAV

SEQ ID NO: 12287 - protein, 23 aa, Bos taurus
MLTSAKILLISILSSLLLFGSHG

SEQ ID NO: 12288 - protein, 23 aa, Bos taurus
MEKMAMKMLVIFVLGMNHWTCTG

SEQ ID NO: 12289 - protein, 23 aa, Bos taurus
MAPAWSFLLALLLLSCNAICSLG

SEQ ID NO: 12290 - protein, 23 aa, Bos taurus
MSAFRFWSGLLMLLGFLCPRSSP

SEQ ID NO: 12291 - protein, 23 aa, Bos taurus
MAPAWSFRLALLLLSCNAICSLG

SEQ ID NO: 12292 - protein, 23 aa, Bos taurus
MRTPMLLALLALATLCLAGRADA

SEQ ID NO: 12293 - protein, 23 aa, Bos taurus
MAPFAPMASGILLLLWLTAPSRA

SEQ ID NO: 12294 - protein, 23 aa, Bos taurus
RVRKKDYFGIWSFPLIIAAVCAQ

SEQ ID NO: 12295 - protein, 23 aa, Bos taurus
MKTSGVFLLLSLALFCFFSGVFG

SEQ ID NO: 12296 - protein, 23 aa, Bos taurus
MAPAWSLLLALLLLSCNAICSLG

SEQ ID NO: 12297 - protein, 23 aa, Bos taurus
MVMVLSPLLLVFILGLGLTPVAP

SEQ ID NO: 12298 - protein, 23 aa, Bos taurus
MAFVLSLLMALVLVSYGPGGSLG

SEQ ID NO: 12299 - protein, 23 aa, Bos taurus
MQPRLLLLAAFLALLVLPEATKA

SEQ ID NO: 12300 - protein, 23 aa, Bos taurus
MKVASIFLLTALVLMSLSGNSGA

SEQ ID NO: 12301 - protein, 23 aa, Bos taurus
MAPAWSLLLALLLLSCNAICSLG

SEQ ID NO: 12302 - protein, 23 aa, Bos taurus
MASRLTPLTLLLLLLLAGDRVTS

SEQ ID NO: 12303 - protein, 24 aa, Bos taurus
MARPMLLLXLSLGLLASLLPALAA

SEQ ID NO: 12304 - protein, 24 aa, Bos taurus
MGITAGKSVLVLLAFLAFASCCYA

SEQ ID NO: 12305 - protein, 24 aa, Bos taurus
MAGPAMLVAAALALCLLLASPGLA

SEQ ID NO: 12306 - protein, 24 aa, Bos taurus
MDYYRKYAAVILAILSLFLQILHS

SEQ ID NO: 12307 - protein, 24 aa, Bos taurus
MVKSHIGSWILVLFVAMWSDVGLC

SEQ ID NO: 12308 - protein, 24 aa, Bos taurus
MRAERTSFLLALGLLVAGIRSVHC

SEQ ID NO: 12309 - protein, 24 aa, Bos taurus
MRVLGGRTGTLLACLALVLPVLEA

SEQ ID NO: 12310 - protein, 24 aa, Bos taurus
MSWSSHPPSVIFYILSLLSSACLA

SEQ ID NO: 12311 - protein, 24 aa, Bos taurus
MTPGALLLLLLGVLGAHLAPGARG

SEQ ID NO: 12312 - protein, 24 aa, Bos taurus
MALWTRLRPLLALLALWPPPPARA

SEQ ID NO: 12313 - protein, 24 aa, Bos taurus
MPRAPALLFSCLLGLCALVPRLPG

SEQ ID NO: 12314 - protein, 25 aa, Bos taurus
MALRLGLFLIWAGVSMFLQLDPVNG

SEQ ID NO: 12315 - protein, 25 aa, Bos taurus
MMSAKDMVKVMIVMLAICFLARSDG

SEQ ID NO: 12316 - protein, 25 aa, Bos taurus
MAPLVGLFLIWAGASVFQQLHPVNG

SEQ ID NO: 12317 - protein, 25 aa, Bos taurus
MPEVLAVRAWPLLLSLAVQLGATVG

SEQ ID NO: 12318 - protein, 25 aa, Bos taurus
MAAPGGARRRPLLLLLFAGLVHGAS

SEQ ID NO: 12319 - protein, 25 aa, Bos taurus
MALQLGLFLIWAGVSVFLQLDPVNG

SEQ ID NO: 12320 - protein, 26 aa, Bos taurus
MNPGAARTPALRILALGALLWPAARP

SEQ ID NO: 12321 - protein, 26 aa, Bos taurus
MRSLTAAARRPEVLLLLLCILQPSQP

SEQ ID NO: 12322 - protein, 26 aa, Bos taurus
MNFLLSWVHWSLALLLYLHHAKWSQA

SEQ ID NO: 12323 - protein, 26 aa, Bos taurus
MLPASPKMEHKAVVFLLLLFLKSGLG

SEQ ID NO: 12324 - protein, 26 aa, Bos taurus
MAVFPNSCLAGCLLIFILLQLPKLDS

SEQ ID NO: 12325 - protein, 26 aa, Bos taurus
MRLHHLLLALLFLVLSAWSGFTQGVG

SEQ ID NO: 12326 - protein, 26 aa, Bos taurus
MGAAARSLPLAFCLLLLGTLLPRADA

SEQ ID NO: 12327 - protein, 26 aa, Bos taurus
MALKSLVLLSLLVLVLLLVQVQPSLG

SEQ ID NO: 12328 - protein, 26 aa, Bos taurus
MMAAGPRTSLLLAFALLCLPWTQVVG

SEQ ID NO: 12329 - protein, 26 aa, Bos taurus
MQPLPSLCGRALVALILACGVAGIQA

SEQ ID NO: 12330 - protein, 26 aa, Bos taurus
MALKSLVVLPLLVLVLLLVRVQPSLG

SEQ ID NO: 12331 - protein, 26 aa, Bos taurus
MALKSLVLLSLLVLVLLLVRVQPSLG

SEQ ID NO: 12332 - protein, 26 aa, Bos taurus
MARGPDTARRWATLVVLAALSTAVTT

SEQ ID NO: 12333 - protein, 27 aa, Bos taurus
MLRARPALWAAALTALTLLRGPPAARA

SEQ ID NO: 12334 - protein, 27 aa, Bos taurus
MGVCGSLFQPWKCLVVVSLRLLFLVPT

SEQ ID NO: 12335 - protein, 27 aa, Bos taurus
MGPHLLGRSSLLLLLLGMWWSVRPLCA

SEQ ID NO: 12336 - protein, 27 aa, Bos taurus
MASSSCLWLLALAFLLGSCASLALGHL

SEQ ID NO: 12337 - protein, 28 aa, Bos taurus
MATPNRLWMALLLLGVLGVLQTPAPAQA

SEQ ID NO: 12338 - protein, 28 aa, Bos taurus
MGAASGRRSPPLLLPLLLLLLPPPPVIL

SEQ ID NO: 12339 - protein, 28 aa, Bos taurus
MESKALLLLALSVCLQSLTVSRGGLVAA

SEQ ID NO: 12340 - protein, 28 aa, Bos taurus
MMSPLHSSWRTGLLLLLLFSVAVRESWQ

SEQ ID NO: 12341 - protein, 28 aa, Bos taurus
MASLLSSSLPSCLPSLLFLLLQLTSSSA

SEQ ID NO: 12342 - protein, 28 aa, Bos taurus
MRLSPVLLRLSRGPALLALALPLAVALA

SEQ ID NO: 12343 - protein, 29 aa, Bos taurus
  MOD_RES 1: note = XXXXX
XTSLLLFVTIWGISSTPAPPDSVFSSSQR

SEQ ID NO: 12344 - protein, 29 aa, Bos taurus
MAAAIPRAASLSPLFPLLFLLSAPQDSSG

SEQ ID NO: 12345 - protein, 29 aa, Bos taurus
MAVASAAPGSIFWKQLLFSLLVLILFCDA

SEQ ID NO: 12346 - protein, 29 aa, Bos taurus
MAAAHRCLFLLLLSTCVALLLQPPLGALG

SEQ ID NO: 12347 - protein, 30 aa, Bos taurus
MAFPPRRRLRLGPRGLPLLLSGLLLPLCRA

SEQ ID NO: 12348 - protein, 30 aa, Bos taurus
MDSKGSSQKGSRLLLLLVVSNLLLCQGVVS

SEQ ID NO: 12349 - protein, 30 aa, Bos taurus
MRPPWCPLHTPSLTPPLLLLLFLIGGGAEA

SEQ ID NO: 12350 - protein, 32 aa, Bos taurus
MQTPQYLQQRRKFAAAFLAFIFILAAVDTAEA

SEQ ID NO: 12351 - protein, 32 aa, Bos taurus
MISNGIGTVTAGKRSICLLPLLLIGLWGCVTC

SEQ ID NO: 12352 - protein, 33 aa, Bos taurus
MQPRLGGPALLLLPPLLLLLLLGAGGGDCGARA

SEQ ID NO: 12353 - protein, 33 aa, Bos taurus
MLRLSERNMKILFVAALVVGSVFFLLLPGPSAA

SEQ ID NO: 12354 - protein, 34 aa, Bos taurus
MRLPGRPGGPGGSGGLRVLLCLLLLGSRPGGCNA

SEQ ID NO: 12355 - protein, 35 aa, Bos taurus
MHLRIHARRNPPRRPAWTLGIWSLFWGCIVSSVWS

SEQ ID NO: 12356 - protein, 35 aa, Bos taurus
MATPNGPRVPCPQAAVARALLFGLVLIQGAGVAGT

SEQ ID NO: 12357 - protein, 36 aa, Bos taurus
MRLLSSRAARVSGPSGSLCALLALLLLTPPGPLASA

SEQ ID NO: 12358 - protein, 36 aa, Bos taurus
MAPASSHRGHQWICDLVRGSCLLLLLVVSNLLLCQG

SEQ ID NO: 12359 - protein, 36 aa, Bos taurus
MAPAPSFRGHQWTYNPVRGSCLLLLLVVSNLLLCQG

SEQ ID NO: 12360 - protein, 50 aa, Bos taurus
MVGDARPSGVRAGGCRGAVGSRTSSRALRPPLPPLSSLFVLFLAAPCAWA

SEQ ID NO: 12361 - protein, 56 aa, Bos taurus
MTACTFLAGGLRDPGLCGPTRWAPSPPGLPPIPPRPRLRLRPPLLLLLLLPRSVLS

SEQ ID NO: 12362 - protein, 20 aa, Bos taurus
VWLAVALGAGGAVLLLFWGG

SEQ ID NO: 12363 - protein, 20 aa, Bos taurus
WNCSMFVLAALVAIISFILL

SEQ ID NO: 12364 - protein, 20 aa, Bos taurus
LKIVFGVATSAVLALLVMCI

SEQ ID NO: 12365 - protein, 17 aa, Bos taurus
YLTEGLLQFTILLSLIG

SEQ ID NO: 12366 - protein, 20 aa, Bos taurus
FILLSAGSCLALLFYFGGLQ

SEQ ID NO: 12367 - protein, 20 aa, Bos taurus
MDAGAVHVVIVGGGFGGIAA

SEQ ID NO: 12368 - protein, 20 aa, Bos taurus
VVGILVGLGIIALVTSPLLL

SEQ ID NO: 12369 - protein, 20 aa, Bos taurus
LLGLLLTWLLLLGLLFGLIA

SEQ ID NO: 12370 - protein, 20 aa, Bos taurus
LLLVAGGVGLALLALRWLAT

SEQ ID NO: 12371 - protein, 20 aa, Bos taurus
KAVGFIVLAIALAGVGILAW

SEQ ID NO: 12372 - protein, 22 aa, Bos taurus
VVAAAGLALALETLPAVLRWLW

SEQ ID NO: 12373 - protein, 20 aa, Bos taurus
LWLVLVAVSAGLLLLGLIIL

SEQ ID NO: 12374 - protein, 20 aa, Bos taurus
LVLAGVSLLLAALLLGCLVA

SEQ ID NO: 12375 - protein, 18 aa, Bos taurus
LCLIFLLTCVFACVFFLL

SEQ ID NO: 12376 - protein, 16 aa, Bos taurus
VVGLIFRLTIFGAVTY

SEQ ID NO: 12377 - protein, 19 aa, Bos taurus
LRALGGLAMAALLSTVWLW

SEQ ID NO: 12378 - protein, 20 aa, Bos taurus
TVTIFVAGVLTASLTIWKKM

SEQ ID NO: 12379 - protein, 21 aa, Bos taurus
FSWLSLKALLSLALVGACITL

SEQ ID NO: 12380 - protein, 24 aa, Bos taurus
PTFALMVCLALLIALLSINGFAYF

SEQ ID NO: 12381 - protein, 25 aa, Bos taurus
YLHTVIPAVVVAAILLIAGIIAMIC

SEQ ID NO: 12382 - protein, 16 aa, Bos taurus
TLIIICALFTLVTVLL

SEQ ID NO: 12383 - protein, 22 aa, Bos taurus
VLLPLVIVFGLCLASFASVVLA

SEQ ID NO: 12384 - protein, 23 aa, Bos taurus
FPWFLIIIFGILGLAVTLYLLIF

SEQ ID NO: 12385 - protein, 20 aa, Bos taurus
IFIVVGVVCALLVALLIAAL

SEQ ID NO: 12386 - protein, 20 aa, Bos taurus
AAVIAGPVCFVCISLMLMVY

SEQ ID NO: 12387 - protein, 20 aa, Bos taurus
YITLFSIVLLGLIATGMFQF

SEQ ID NO: 12388 - protein, 20 aa, Bos taurus
TVATVLAFITSFLTLSWYTT

SEQ ID NO: 12389 - protein, 20 aa, Bos taurus
LILLLIAFSLGSMGFLAYYV

SEQ ID NO: 12390 - protein, 33 aa, Bos taurus
HDHRKRMGLKMLLMMGLLLPLVYAMKRHKWSVL

SEQ ID NO: 12391 - protein, 22 aa, Bos taurus
WWTNWLIPAISALFVALIYHLY

SEQ ID NO: 12392 - protein, 25 aa, Bos taurus
EWKTVVGAAMFFIGFTALLLIWEKH

SEQ ID NO: 12393 - protein, 26 aa, Bos taurus
KWRLLAMMTLFFGSGFAAPFFIVRHQ

SEQ ID NO: 12394 - protein, 20 aa, Bos taurus
LYIVLPIALLILLAFGTFLL

SEQ ID NO: 12395 - protein, 40 aa, Bos taurus
LLARRLRFHIVGAFMVSLGFATFYKFAVAEKRKKAYADFY

SEQ ID NO: 12396 - protein, 28 aa, Bos taurus
ATDNILYRVTMTLCLGGTLYSLYCLGWA

SEQ ID NO: 12397 - protein, 24 aa, Bos taurus
ARTWRFLTFGLALPSVALCTLNSW

SEQ ID NO: 12398 - protein, 19 aa, Bos taurus
LLVAVCALHLGVTLVYYLA

SEQ ID NO: 12399 - protein, 22 aa, Bos taurus
AVGAVLSLLLVALTACLLTLLL

SEQ ID NO: 12400 - protein, 20 aa, Bos taurus
LVLAGVSLLLAALLLGCLVA

SEQ ID NO: 12401 - protein, 23 aa, Bos taurus
PKEQAIGLSVTFLSFLLPAGWVL

SEQ ID NO: 12402 - protein, 20 aa, Bos taurus
VVLGAVIGGVLGVVLLALLL

SEQ ID NO: 12403 - protein, 23 aa, Bos taurus
VIPVVVLLAIALFIRWKKSRAFG

SEQ ID NO: 12404 - protein, 25 aa, Bos taurus
LSVGSILLVTLASLVAVYIIGGFLY

SEQ ID NO: 12405 - protein, 20 aa, Bos taurus
VGQWVLLFLGVALLVATLGL

SEQ ID NO: 12406 - protein, 26 aa, Bos taurus
FHDKYGNAVLASGATFCVAVWVYMAT

SEQ ID NO: 12407 - protein, 36 aa, Bos taurus
KESSEARKGFSYLVTATTTVGVAYAAKNVVSQFVSS

SEQ ID NO: 12408 - protein, 15 aa, Bos taurus
VILSMLVVSTVIVVF

SEQ ID NO: 12409 - protein, 20 aa, Bos taurus
ISLQYWLAFLLEIVSFLLSP

SEQ ID NO: 12410 - protein, 20 aa, Bos taurus
EAASMYGTAVAVFLVILVAA

SEQ ID NO: 12411 - protein, 18 aa, Bos taurus
PVKRNTVKKYKIICIVLL

SEQ ID NO: 12412 - protein, 20 aa, Bos taurus
VVLISGAVLLLLGAIGAFYF

SEQ ID NO: 12413 - protein, 21 aa, Bos taurus
IIAILLCIIILLILVLMFVVW

SEQ ID NO: 12414 - protein, 20 aa, Bos taurus
VSGLLKIVGFSTSITALWFV

SEQ ID NO: 12415 - protein, 25 aa, Bos taurus
TALITLYLIVFVVLVPIIGIVAAQL

SEQ ID NO: 12416 - protein, 22 aa, Bos taurus
LFFIIGTVMLVIIIFIVVLSVS

SEQ ID NO: 12417 - protein, 17 aa, Bos taurus
GAIVGILVVTFVLLLVA

SEQ ID NO: 12418 - protein, 22 aa, Bos taurus
IAAIVGGTVGGVVLVGILLLVI

SEQ ID NO: 12419 - protein, 22 aa, Bos taurus
IMIVICCVVLGIVIASTFGGIF

SEQ ID NO: 12420 - protein, 20 aa, Bos taurus
FSQRLFMILWLKGVVFNVTT

SEQ ID NO: 12421 - protein, 27 aa, Bos taurus
MIVITSILGSLPFFLLIGFAGAIVLSL

SEQ ID NO: 12422 - protein, 20 aa, Bos taurus
IITAEGIILLICAVVPGTLL

SEQ ID NO: 12423 - protein, 20 aa, Bos taurus
GFFSPGIWMGLLTSLFMLFI

SEQ ID NO: 12424 - protein, 20 aa, Bos taurus
LVVLVALLAAALVACLAVLG

SEQ ID NO: 12425 - protein, 20 aa, Bos taurus
LLIGFVIAAGLMCIFVMILT

SEQ ID NO: 12426 - protein, 19 aa, Bos taurus
VALGTGITFIMFGVSSFLI

SEQ ID NO: 12427 - protein, 22 aa, Bos taurus
PWALIAIAIVAVLLVLTCCFCI

SEQ ID NO: 12428 - protein, 20 aa, Bos taurus
VMLGLGLATVMTLTLAAIVL

SEQ ID NO: 12429 - protein, 28 aa, Bos taurus
GPSHSVIPLTVALTLLVILAISTLSFCM

SEQ ID NO: 12430 - protein, 23 aa, Bos taurus
IFMYLLTVFLITQMIGSALFAVY

SEQ ID NO: 12431 - protein, 18 aa, Bos taurus
GLIAVVVIGVIIVTLVLG

SEQ ID NO: 12432 - protein, 17 aa, Bos taurus
SLWALLILLIPIVLIIY

SEQ ID NO: 12433 - protein, 21 aa, Bos taurus
GVIVGSVIAGILLLLALVAIL

SEQ ID NO: 12434 - protein, 20 aa, Bos taurus
IIPIVAGVVAGIVLIGLALL

SEQ ID NO: 12435 - protein, 24 aa, Bos taurus
PSVVFIGFLLVVGMGLAGAFLAHY

SEQ ID NO: 12436 - protein, 26 aa, Bos taurus
PGLLKLIGLTTIFSATALGFLAHKRG

SEQ ID NO: 12437 - protein, 24 aa, Bos taurus
SVLLTLVALAGVAGLLVALAVALC

SEQ ID NO: 12438 - protein, 23 aa, Bos taurus
IMIIICCVVLGVVLASSIGGTLG

SEQ ID NO: 12439 - protein, 20 aa, Bos taurus
MLYLYVLSGIGGLLLLFLIF

SEQ ID NO: 12440 - protein, 19 aa, Bos taurus
MMIILGVICAIILIIIIVY

SEQ ID NO: 12441 - protein, 20 aa, Bos taurus
ITLALAFLLLISTAANVSLF

SEQ ID NO: 12442 - protein, 23 aa, Bos taurus
KALGILAILLGVAAVATIIALSV

SEQ ID NO: 12443 - protein, 22 aa, Bos taurus
AAVTLGVLCLGLLVTVILLILQ

SEQ ID NO: 12444 - protein, 23 aa, Bos taurus
PVWVIILAVLAGLLLLAVLVFVM

SEQ ID NO: 12445 - protein, 20 aa, Bos taurus
YPVVFNLVLWIMIGLALTLI

SEQ ID NO: 12446 - protein, 20 aa, Bos taurus
VSTLVPLALVLVAGVVAIGV

SEQ ID NO: 12447 - protein, 22 aa, Bos taurus
VLLGLLAIAALVTVITVPVVLL

SEQ ID NO: 12448 - protein, 28 aa, Bos taurus
VMFAVLFVILVALCAGLIAVSWLSIQGS

SEQ ID NO: 12449 - protein, 22 aa, Bos taurus
LAVGLSTAGVSLVTIPSFLFWL

SEQ ID NO: 12450 - protein, 20 aa, Bos taurus
LFIPVAVMVTAFSGLAFIIW

SEQ ID NO: 12451 - protein, 22 aa, Bos taurus
WAILAMVLGSVLLLCILFTCFC

SEQ ID NO: 12452 - protein, 20 aa, Bos taurus
AGIGLLIMGFLVLGLVPFLL

SEQ ID NO: 12453 - protein, 20 aa, Bos taurus
TWLIVGTCTALFSIPVVIYV

SEQ ID NO: 12454 - protein, 23 aa, Bos taurus
LIPIAVGGALAGLVLIVLLAYLI

SEQ ID NO: 12455 - protein, 23 aa, Bos taurus
LMIALPIAVLLIVGGLVIMLYVF

SEQ ID NO: 12456 - protein, 20 aa, Bos taurus
APLFVGILLVLTALLLASLI

SEQ ID NO: 12457 - protein, 20 aa, Bos taurus
FSFLLVAGATTLFCLLHFGV

SEQ ID NO: 12458 - protein, 20 aa, Bos taurus
LIAILGSAGMTCLTVLLAFL

SEQ ID NO: 12459 - protein, 19 aa, Bos taurus
VVLATSLIWVLLDMFLLLY

SEQ ID NO: 12460 - protein, 20 aa, Bos taurus
MVVITVLLSVAMFLLVLGLI

SEQ ID NO: 12461 - protein, 20 aa, Bos taurus
ILFFVLGLYVAIPFLIKLCP

SEQ ID NO: 12462 - protein, 18 aa, Bos taurus
MMVAFLGASAVTASTGLL

SEQ ID NO: 12463 - protein, 20 aa, Bos taurus
LTVIVTACLTFATGVTVALI

SEQ ID NO: 12464 - protein, 20 aa, Bos taurus
VGFFGSGVGFSLILGFSVAY

SEQ ID NO: 12465 - protein, 20 aa, Bos taurus
ATLIIVVCVGFLVLMVVLGL

SEQ ID NO: 12466 - protein, 20 aa, Bos taurus
YLIPFLIIVGICLILIVIFM

SEQ ID NO: 12467 - protein, 23 aa, Bos taurus
WIVAYWWAVLLMGIALIMLMAGF

SEQ ID NO: 12468 - protein, 18 aa, Bos taurus
CLPGLLLQLLLALCFFSY

SEQ ID NO: 12469 - protein, 18 aa, Bos taurus
IFTSPLNLLLLGLCIFLL

SEQ ID NO: 12470 - protein, 20 aa, Bos taurus
LTIIIIIISVVFIYIIVSPL

SEQ ID NO: 12471 - protein, 21 aa, Bos taurus
IMMYVLIVVLTIWLVAEMVYC

SEQ ID NO: 12472 - protein, 20 aa, Bos taurus
CVLLTALLALAAYYIYIPLP

SEQ ID NO: 12473 - protein, 22 aa, Bos taurus
ILAFVASFLLWPSALIRIYYWY

SEQ ID NO: 12474 - protein, 20 aa, Bos taurus
MIIALGGVIVASVLVFIFVL

SEQ ID NO: 12475 - protein, 16 aa, Bos taurus
WAPALLWLATAAAVAG

SEQ ID NO: 12476 - protein, 22 aa, Bos taurus
VGLIILSVVFAVCLLACLLGVA

SEQ ID NO: 12477 - protein, 25 aa, Bos taurus
YYNILLYSLVPLMLIAGIVICAFWV

SEQ ID NO: 12478 - protein, 23 aa, Bos taurus
GAIIGLMVGGVVIATVIVITLVM

SEQ ID NO: 12479 - protein, 20 aa, Bos taurus
FFTWFMVIALLGVWTSVAVV

SEQ ID NO: 12480 - protein, 20 aa, Bos taurus
FFFPTAPFILFVFTASTIFH

SEQ ID NO: 12481 - protein, 22 aa, Bos taurus
WAAVALPAFFSLVIGFAFGAFY

SEQ ID NO: 12482 - protein, 20 aa, Bos taurus
GMVVGIVAAAALCILILLYA

SEQ ID NO: 12483 - protein, 20 aa, Bos taurus
GMVVGIVAAAALCILILLYA

SEQ ID NO: 12484 - protein, 20 aa, Bos taurus
GMVVGIVAAAALCILILLYA

SEQ ID NO: 12485 - protein, 20 aa, Bos taurus
WIFVAILSAVICLIMVWAVA

SEQ ID NO: 12486 - protein, 20 aa, Bos taurus
VVAGLSCAFIVLVFVTVFLV

SEQ ID NO: 12487 - protein, 20 aa, Bos taurus
LVVIPVTMGVLFAVLLVSAC

SEQ ID NO: 12488 - protein, 20 aa, Bos taurus
WLIILASLLALALILAVCIA

SEQ ID NO: 12489 - protein, 19 aa, Bos taurus
MSWAVVFGLLAALLLLLLL

SEQ ID NO: 12490 - protein, 20 aa, Bos taurus
IAYVMAAICALFMLPLCLMV

SEQ ID NO: 12491 - protein, 20 aa, Bos taurus
SLLATYGWYIVFSCILLYVV

SEQ ID NO: 12492 - protein, 20 aa, Bos taurus
LSIVILLELAILGGLVYYKF

SEQ ID NO: 12493 - protein, 20 aa, Bos taurus
VAVFCLLGLGVLYHLYSGFL

SEQ ID NO: 12494 - protein, 20 aa, Bos taurus
VLLVLILAVVGFGALMTQLF

SEQ ID NO: 12495 - protein, 20 aa, Bos taurus
PLFVVVILLGLLIFFSPTMF

SEQ ID NO: 12496 - protein, 20 aa, Bos taurus
FLGLSSFGLLFVVFYFTHLE

SEQ ID NO: 12497 - protein, 20 aa, Bos taurus
LRIGGLIIAGILFILGILIV

SEQ ID NO: 12498 - protein, 17 aa, Bos taurus
ISPWTLMALTLQTLSLT

SEQ ID NO: 12499 - protein, 20 aa, Bos taurus
WGLILLFYLVFYGFLAALFS

SEQ ID NO: 12500 - protein, 20 aa, Bos taurus
MIVLICVIVFIIILFIVLFA

SEQ ID NO: 12501 - protein, 20 aa, Bos taurus
RVLWWSILQTLILVAIGVWQ

SEQ ID NO: 12502 - protein, 20 aa, Bos taurus
WLAYYLALLVSLLVMVISPV

SEQ ID NO: 12503 - protein, 20 aa, Bos taurus
CIIIFILVIGVVIIGLIIWG

SEQ ID NO: 12504 - protein, 20 aa, Bos taurus
LVLLWLLGLPWTWSTAAALG

SEQ ID NO: 12505 - protein, 20 aa, Bos taurus
LIAVTLGILCSVMLVITVVL

SEQ ID NO: 12506 - protein, 20 aa, Bos taurus
FMLVVSIVIGVGGCWFAYIQ

SEQ ID NO: 12507 - protein, 20 aa, Bos taurus
IWLIIFGVVMGVVVIGIVVL

SEQ ID NO: 12508 - protein, 20 aa, Bos taurus
VLYFSIFSMFCLIGLATWQV

SEQ ID NO: 12509 - protein, 22 aa, Bos taurus
PLLRWVLTLSFLVATVAVGLYA

SEQ ID NO: 12510 - protein, 19 aa, Bos taurus
QDAMVILGGGGLLFASYLT

SEQ ID NO: 12511 - protein, 20 aa, Bos taurus
LPAVFDGVKLAAVAAVLYVI

SEQ ID NO: 12512 - protein, 20 aa, Bos taurus
TLALLVGSQLAVMMYLSLGG

SEQ ID NO: 12513 - protein, 20 aa, Bos taurus
CFGLSLLMVALGLAVPMLHH

SEQ ID NO: 12514 - protein, 22 aa, Bos taurus
CLVLFPRFLGTAFMLWLLDFLC

SEQ ID NO: 12515 - protein, 20 aa, Bos taurus
LFMININILLIFIFIVLLIH

SEQ ID NO: 12516 - protein, 16 aa, Bos taurus
LLGAAALALGGALGLY

SEQ ID NO: 12517 - protein, 20 aa, Bos taurus
ILGILGGILAFLILILLLLL

SEQ ID NO: 12518 - protein, 20 aa, Bos taurus
ALLVLALLFFAAAAGLAVCY

SEQ ID NO: 12519 - protein, 20 aa, Bos taurus
LGAGYIVLVIVAVLIGVGLL

SEQ ID NO: 12520 - protein, 18 aa, Bos taurus
VGASALCVVVLCWLYVFP

SEQ ID NO: 12521 - protein, 20 aa, Bos taurus
ALLIITIVVPGLVLAVAVTV

SEQ ID NO: 12522 - protein, 22 aa, Bos taurus
GLIVGVVSISIILLLLLGLFLW

SEQ ID NO: 12523 - protein, 17 aa, Bos taurus
GHHLWALGCYMLLAVVA

SEQ ID NO: 12524 - protein, 20 aa, Bos taurus
LISGVLGVICLVLMAALGVL

SEQ ID NO: 12525 - protein, 20 aa, Bos taurus
LFCNWFRPVLISVVSIAALI

SEQ ID NO: 12526 - protein, 17 aa, Bos taurus
YLLPILGIFLAYYYYSA

SEQ ID NO: 12527 - protein, 20 aa, Bos taurus
FLIVCIILACSMVCLFIYIK

SEQ ID NO: 12528 - protein, 24 aa, Bos taurus
GLPGTHLALLAASLLSSSVAIYVC

SEQ ID NO: 12529 - protein, 20 aa, Bos taurus
IVVEFFVVTFKVLWAFVLAA

SEQ ID NO: 12530 - protein, 20 aa, Bos taurus
SSTCVLVLLFSFCLLLVPAM

SEQ ID NO: 12531 - protein, 20 aa, Bos taurus
LLVLVCVLVALAIIYLIALV

SEQ ID NO: 12532 - protein, 20 aa, Bos taurus
IAGAVIGTLLALVLIALIVF

SEQ ID NO: 12533 - protein, 22 aa, Bos taurus
LFSFPTKYYFLFLAFSVVTFTV

SEQ ID NO: 12534 - protein, 20 aa, Bos taurus
VLSVVTGMLVVLVVLFALLL

SEQ ID NO: 12535 - protein, 20 aa, Bos taurus
VLAYSLLPVGGLSLIALLAF

SEQ ID NO: 12536 - protein, 20 aa, Bos taurus
GVLAGIVLGDLMLTLLIALA

SEQ ID NO: 12537 - protein, 21 aa, Bos taurus
LSGYSMFAVGIGALLFGYWSM

SEQ ID NO: 12538 - protein, 20 aa, Bos taurus
AAVVSAACCALFLLLLLTGV

SEQ ID NO: 12539 - protein, 20 aa, Bos taurus
LCYILDAILFLYGIVLTLLY

SEQ ID NO: 12540 - protein, 20 aa, Bos taurus
LFLGFFGLSLALHLLTLCCY

SEQ ID NO: 12541 - protein, 20 aa, Bos taurus
VLASAVLGLASIFCLGLTSY

SEQ ID NO: 12542 - protein, 20 aa, Bos taurus
TMVAVVALAGVVATLSLISY

SEQ ID NO: 12543 - protein, 20 aa, Bos taurus
WVAGLSGILIVGALFMSYLA

SEQ ID NO: 12544 - protein, 20 aa, Bos taurus
TIISVSVVTVLLVSVVGVLV

SEQ ID NO: 12545 - protein, 20 aa, Bos taurus
VVLPVLLLLLVLAVGLAVFF

SEQ ID NO: 12546 - protein, 20 aa, Bos taurus
VIWMMAAAMLVLTVVLGLYG

SEQ ID NO: 12547 - protein, 20 aa, Bos taurus
LVLLALAVITIFALVCVLIA

SEQ ID NO: 12548 - protein, 20 aa, Bos taurus
FSQRLFMILWLKGVVFSVTT

SEQ ID NO: 12549 - protein, 19 aa, Bos taurus
ILLLFVCGTALLLGVPSLA

SEQ ID NO: 12550 - protein, 20 aa, Bos taurus
VGGVCYLSMGMVVLLMGLVF

SEQ ID NO: 12551 - protein, 20 aa, Bos taurus
IGIVIGALLVLTTLTCLIII

SEQ ID NO: 12552 - protein, 20 aa, Bos taurus
GLSTRLLALVVLFFIVGVII

SEQ ID NO: 12553 - protein, 20 aa, Bos taurus
LYIILSTGGIFLLVTLVTVC

SEQ ID NO: 12554 - protein, 20 aa, Bos taurus
TLPLILGLILGLVIVVTLVI

SEQ ID NO: 12555 - protein, 20 aa, Bos taurus
LFINFCLISICLLLICIIVM

SEQ ID NO: 12556 - protein, 20 aa, Bos taurus
ILAPVLVLLALLLATGLAAL

SEQ ID NO: 12557 - protein, 20 aa, Bos taurus
AVLGLYLLVFLILVGIFILA

SEQ ID NO: 12558 - protein, 17 aa, Bos taurus
LLVTALVGAGLGGAWLA

SEQ ID NO: 12559 - protein, 18 aa, Bos taurus
MIYYLVVGVTVSAGGYYT

SEQ ID NO: 12560 - protein, 20 aa, Bos taurus
GLVLGALFTSFLLLLYSYAV

SEQ ID NO: 12561 - protein, 18 aa, Bos taurus
IASFLSVFKLVLIGLIIV

SEQ ID NO: 12562 - protein, 20 aa, Bos taurus
LSIILLYILCALLTITVAIL

SEQ ID NO: 12563 - protein, 20 aa, Bos taurus
LIFNIYVVFYCSAVIMPQIC

SEQ ID NO: 12564 - protein, 20 aa, Bos taurus
LASITGISLFLIISMCLLFL

SEQ ID NO: 12565 - protein, 20 aa, Bos taurus
IIFFLILFIFLLFLGIFVYS

SEQ ID NO: 12566 - protein, 20 aa, Bos taurus
AWGFFSSFLLLAFGTLVAAL

SEQ ID NO: 12567 - protein, 20 aa, Bos taurus
VTGPVLAVILIVLIVIAILL

SEQ ID NO: 12568 - protein, 16 aa, Bos taurus
VTATVAGLTLLAVGIY

SEQ ID NO: 12569 - protein, 20 aa, Bos taurus
GAWAQLVAALLLLAIGFSLA

SEQ ID NO: 12570 - protein, 16 aa, Bos taurus
YWPFAVIAALLIGGFL

SEQ ID NO: 12571 - protein, 20 aa, Bos taurus
WPFFLFIPFFIILCVLIATL

SEQ ID NO: 12572 - protein, 25 aa, Bos taurus
ALTIVVGALFFERAFDQGADAIYEH

SEQ ID NO: 12573 - protein, 16 aa, Bos taurus
TWLTMILSMFLTLFII

SEQ ID NO: 12574 - protein, 22 aa, Bos taurus
SPGALTFAIIWPFIAQWLVHLY

SEQ ID NO: 12575 - protein, 22 aa, Bos taurus
LARNWVPTASLWGAVGAVGLVW

SEQ ID NO: 12576 - protein, 22 aa, Bos taurus
SAVTGIVVGALLGAGLLMAFYF

SEQ ID NO: 12577 - protein, 18 aa, Bos taurus
IAVAGCTLLLASILLLSC

SEQ ID NO: 12578 - protein, 28 aa, Bos taurus
RRTRACILRVAPPFVAFYLVYTWGTQEF

SEQ ID NO: 12579 - protein, 19 aa, Bos taurus
VGLVLLVVTGAVVAGVVIC

SEQ ID NO: 12580 - protein, 20 aa, Bos taurus
MGIIVGLVLLVVALVAGAVI

SEQ ID NO: 12581 - protein, 26 aa, Bos taurus
LTPWMVAVAVILVVLGLLTIGSIFFT

SEQ ID NO: 12582 - protein, 29 aa, Bos taurus
AGLGAGAVMSIILALLLLAVLLVVCGPLA

SEQ ID NO: 12583 - protein, 20 aa, Bos taurus
WAILAILLGIALLFCILFTL

SEQ ID NO: 12584 - protein, 23 aa, Bos taurus
LTYVGGAAAGTTGLVTGSILLAL

SEQ ID NO: 12585 - protein, 20 aa, Bos taurus
IAIALLVILVICSLIVTSVI

SEQ ID NO: 12586 - protein, 19 aa, Bos taurus
TSLLGALFGIGPLVFWYYV

SEQ ID NO: 12587 - protein, 20 aa, Bos taurus
GTKISAINLAIFALAMILSI

SEQ ID NO: 12588 - protein, 19 aa, Bos taurus
QLYYQVLNFGMIVSSALMI

SEQ ID NO: 12589 - protein, 16 aa, Bos taurus
ITFCLVMGVLFAVDTG

SEQ ID NO: 12590 - protein, 20 aa, Bos taurus
TILLAVVGSILLTGFALLVI

SEQ ID NO: 12591 - protein, 20 aa, Bos taurus
TVALGILGVILLAFLIATLL

SEQ ID NO: 12592 - protein, 22 aa, Bos taurus
VSFVGALLKGFKWGFAAFVVAI

SEQ ID NO: 12593 - protein, 22 aa, Bos taurus
TYRHSIFAFTHVLIPVWIIHYY

SEQ ID NO: 12594 - protein, 20 aa, Bos taurus
VLVASFAIAGLAVILPTLSP

SEQ ID NO: 12595 - protein, 24 aa, Bos taurus
QLVLAVVGSVSATCLTILAALLTL

SEQ ID NO: 12596 - protein, 20 aa, Bos taurus
WLMVKIFLILIVFFIIFVVF

SEQ ID NO: 12597 - protein, 20 aa, Bos taurus
LGLSVFSMLCCFWPLGIAAF

SEQ ID NO: 12598 - protein, 20 aa, Bos taurus
TLIILGVVGGVIGLLIFILL

SEQ ID NO: 12599 - protein, 20 aa, Bos taurus
AVFVILFALITILILYSSSS

SEQ ID NO: 12600 - protein, 20 aa, Bos taurus
VVLMAVLAAFLALSLLAGLL

SEQ ID NO: 12601 - protein, 20 aa, Bos taurus
WPIFLFFAVILGGPYLIWKL

SEQ ID NO: 12602 - protein, 19 aa, Bos taurus
MMIMLGAICAIIVVVIVIY

SEQ ID NO: 12603 - protein, 20 aa, Bos taurus
LPWKPVLITASLGIVSFAVF

SEQ ID NO: 12604 - protein, 22 aa, Bos taurus
LNILTFLCGSAVGFVLCSQLLS

SEQ ID NO: 12605 - protein, 20 aa, Bos taurus
LVPFLFFVVVPFMEFLLPVA

SEQ ID NO: 12606 - protein, 20 aa, Bos taurus
IWIIIFGVIFCIVLVATMLL

SEQ ID NO: 12607 - protein, 20 aa, Bos taurus
VTILVSLALAFLACIVFLVV

SEQ ID NO: 12608 - protein, 20 aa, Bos taurus
PGFFPRLGVIGFAGVVGLVL

SEQ ID NO: 12609 - protein, 20 aa, Bos taurus
LGYVLATLLLFILLLITVVL

SEQ ID NO: 12610 - protein, 22 aa, Bos taurus
ARAGLGLLLGTAAGLGFLCALY

SEQ ID NO: 12611 - protein, 20 aa, Bos taurus
LGAVVAVAASFFCASLFSAV

SEQ ID NO: 12612 - protein, 22 aa, Bos taurus
LLGLRTFVAFAAKLWSFFIYLL

SEQ ID NO: 12613 - protein, 20 aa, Bos taurus
LAGLVAADAVVSLLIVVVVF

SEQ ID NO: 12614 - protein, 25 aa, Bos taurus
GVPLWIIILAILIGLLLLGLLIYIL

SEQ ID NO: 12615 - protein, 27 aa, Bos taurus
ILLFYLVFYGFLTAMFTLTMWVMLQTV

SEQ ID NO: 12616 - protein, 20 aa, Bos taurus
WAILAILLGIALLFSILLTL

SEQ ID NO: 12617 - protein, 26 aa, Bos taurus
FWALVVVNGVLVFYSLLVTVALSNCW

SEQ ID NO: 12618 - protein, 20 aa, Bos taurus
GMIITDIIATVLLALGVYCF

SEQ ID NO: 12619 - protein, 20 aa, Bos taurus
AGFIFTEIVSIFLLAVGVYF

SEQ ID NO: 12620 - protein, 20 aa, Bos taurus
LVLGVLVGCFIVTGVAVGIF

SEQ ID NO: 12621 - protein, 20 aa, Bos taurus
AVAIGTCFAAVAIVAAIITW

SEQ ID NO: 12622 - protein, 17 aa, Bos taurus
GSIAGLSMVLAAYVFLN

SEQ ID NO: 12623 - protein, 16 aa, Bos taurus
LANFGGLAVGLGFGAL

SEQ ID NO: 12624 - protein, 20 aa, Bos taurus
VPVLSLLAIVFILAGVLLYV

SEQ ID NO: 12625 - protein, 20 aa, Bos taurus
IFFVSVSFFIITAATVGYFI

SEQ ID NO: 12626 - protein, 20 aa, Bos taurus
LFLIVFFSLVFSVFAIVIGI

SEQ ID NO: 12627 - protein, 22 aa, Bos taurus
WLRASFGATVFAVLGFAMYKAL

SEQ ID NO: 12628 - protein, 20 aa, Bos taurus
IMMYILLVFLTLWLLIEMIY

SEQ ID NO: 12629 - protein, 18 aa, Bos taurus
FFVAVPVAVTFLDRVACV

SEQ ID NO: 12630 - protein, 20 aa, Bos taurus
VAAFGVISFIAILVVVVIVL

SEQ ID NO: 12631 - protein, 20 aa, Bos taurus
LLLALAGALLACLLVLTADP

SEQ ID NO: 12632 - protein, 20 aa, Bos taurus
MWAIGITVVVIIIIIIVVWS

SEQ ID NO: 12633 - protein, 20 aa, Bos taurus
LLIPAPLLGLLLLLLLSVLL

SEQ ID NO: 12634 - protein, 20 aa, Bos taurus
GLLGGALANLFVIVGFAAFA

SEQ ID NO: 12635 - protein, 20 aa, Bos taurus
FWSAVNVAVLLLVAVLQVCT

SEQ ID NO: 12636 - protein, 20 aa, Bos taurus
LGAVLGALCLFPALVLLAWP

SEQ ID NO: 12637 - protein, 17 aa, Bos taurus
ILGIVVGTAGISLLLLW

SEQ ID NO: 12638 - protein, 22 aa, Bos taurus
ILFFRLDIRMGLLYITLCIVFL

SEQ ID NO: 12639 - protein, 20 aa, Bos taurus
SLILGGVIGVCTILLLLYAF

SEQ ID NO: 12640 - protein, 20 aa, Bos taurus
AASFIGGIVLVLGVQAVIFF

SEQ ID NO: 12641 - protein, 20 aa, Bos taurus
VAIICAVVVAVGLIVGLSVG

SEQ ID NO: 12642 - protein, 20 aa, Bos taurus
WCIAVLGLALLSACFIVSCV

SEQ ID NO: 12643 - protein, 20 aa, Bos taurus
ALYEAPAYHLILEGILILWI

SEQ ID NO: 12644 - protein, 20 aa, Bos taurus
LIAILLCIVTLLVTVVLFAA

SEQ ID NO: 12645 - protein, 20 aa, Bos taurus
IFAYMMAVILCGTVLFIFSI

SEQ ID NO: 12646 - protein, 20 aa, Bos taurus
IAICLSITVLILVVIIVIST

SEQ ID NO: 12647 - protein, 20 aa, Bos taurus
WLWFIYLLTAALPIALIGSF

SEQ ID NO: 12648 - protein, 20 aa, Bos taurus
LFSTTDVILFSLIVGVMTYW

SEQ ID NO: 12649 - protein, 16 aa, Bos taurus
LLAAGLALALVLAVHL

SEQ ID NO: 12650 - protein, 20 aa, Bos taurus
CIAVLLFSFALIVLPSISPF

SEQ ID NO: 12651 - protein, 20 aa, Bos taurus
KVFIPSLFLSHVLALGLGIY

SEQ ID NO: 12652 - protein, 20 aa, Bos taurus
IPIAMVLVPVFALTMVAAWA

SEQ ID NO: 12653 - protein, 20 aa, Bos taurus
WCMCFGLAFMLAGVILGGAY

SEQ ID NO: 12654 - protein, 20 aa, Bos taurus
GLLYLVLILPSCLTLLVACT

SEQ ID NO: 12655 - protein, 22 aa, Bos taurus
TLTGRMNCVLATYGSIALIVLY

SEQ ID NO: 12656 - protein, 20 aa, Bos taurus
GPWLLALFIFVVCGSAIFQI

SEQ ID NO: 12657 - protein, 19 aa, Bos taurus
EWIAAVTIAAGTAAIGYLA

SEQ ID NO: 12658 - protein, 20 aa, Bos taurus
YYLEILMVTGLLAYIMNYII

SEQ ID NO: 12659 - protein, 20 aa, Bos taurus
GNLASMLLIACAFTLSLVYL

SEQ ID NO: 12660 - protein, 20 aa, Bos taurus
IFSGFAALLAILLVVAVICV

SEQ ID NO: 12661 - protein, 18 aa, Bos taurus
RRRLGQLSCMSKPALKLR

SEQ ID NO: 12662 - protein, 20 aa, Bos taurus
AWAALLLAVAAVLAQVVWLW

SEQ ID NO: 12663 - protein, 20 aa, Bos taurus
FSQRLFMVLWLKGVTFNVTT

SEQ ID NO: 12664 - protein, 22 aa, Bos taurus
VALGAMGAAVAAILSFSLYRVL

SEQ ID NO: 12665 - protein, 20 aa, Bos taurus
VVVVGVIAALLFCLLVVVVV

SEQ ID NO: 12666 - protein, 27 aa, Bos taurus
CAFYQLLLAALMLVAMLQLLYLSLLSG

SEQ ID NO: 12667 - protein, 19 aa, Bos taurus
MAVRLVMVGSAFVLFLFIL

SEQ ID NO: 12668 - protein, 20 aa, Bos taurus
FLTVTVLLALVLSGALVTFL

SEQ ID NO: 12669 - protein, 20 aa, Bos taurus
WRSAVGFFLWVIVLSTWITI

SEQ ID NO: 12670 - protein, 24 aa, Bos taurus
ITLQILPVFFSNCLFLALYDSVIL

SEQ ID NO: 12671 - protein, 20 aa, Bos taurus
AVLNALLVSVLAAVLWKHVR

SEQ ID NO: 12672 - protein, 20 aa, Bos taurus
LAIATALAILLLQGLVVWSF

SEQ ID NO: 12673 - protein, 20 aa, Bos taurus
GLLIVTIVVVMLVLGMAVAF

SEQ ID NO: 12674 - protein, 20 aa, Bos taurus
IIIPAACGLLSKTLVFIGLF

SEQ ID NO: 12675 - protein, 20 aa, Bos taurus
ALVAIFLCILTFTVITLLII

SEQ ID NO: 12676 - protein, 20 aa, Bos taurus
ILKCTLLLFGVWILFYILKL

SEQ ID NO: 12677 - protein, 20 aa, Bos taurus
GVVFGAILGAILGASLLSLV

SEQ ID NO: 12678 - protein, 20 aa, Bos taurus
IWPWLIGAAVVGSVLTAVLG

SEQ ID NO: 12679 - protein, 19 aa, Bos taurus
AATIFSAVLLAAVALAVCV

SEQ ID NO: 12680 - protein, 20 aa, Bos taurus
MIMLGVSLAILLIGVVLLCI

SEQ ID NO: 12681 - protein, 23 aa, Bos taurus
IVTIAVVAALSLVAVIFAGASCL

SEQ ID NO: 12682 - protein, 20 aa, Bos taurus
AVGVLAGIMAIIVAITVLIS

SEQ ID NO: 12683 - protein, 20 aa, Bos taurus
LFALEAVLIPLGSMGLIVSL

SEQ ID NO: 12684 - protein, 20 aa, Bos taurus
IGGIITLFLITAVFISTVMI

SEQ ID NO: 12685 - protein, 20 aa, Bos taurus
WSTFVAPSICMAVIMVGVLS

SEQ ID NO: 12686 - protein, 21 aa, Bos taurus
LIVGIVVGLLLAALVAGVVYW

SEQ ID NO: 12687 - protein, 20 aa, Bos taurus
WIMLILFAWGTLLFYIGGHL

SEQ ID NO: 12688 - protein, 20 aa, Bos taurus
FWATCPSSSTVCFLFVIFAV

SEQ ID NO: 12689 - protein, 20 aa, Bos taurus
IVAAVFVTLILLGALIFGIW

SEQ ID NO: 12690 - protein, 20 aa, Bos taurus
LAAAIFLPLVAMALLVGGVY

SEQ ID NO: 12691 - protein, 20 aa, Bos taurus
LAAVMGSMFAVISLASIAVY

SEQ ID NO: 12692 - protein, 20 aa, Bos taurus
VVTGTMALIFSFLIVVLVLY

SEQ ID NO: 12693 - protein, 17 aa, Bos taurus
LAVTFAIGGALLAGMKY

SEQ ID NO: 12694 - protein, 20 aa, Bos taurus
TIAGVASALAMALIGAVSSY

SEQ ID NO: 12695 - protein, 20 aa, Bos taurus
FFAKYWMYIVPVVLFLMMSG

SEQ ID NO: 12696 - protein, 18 aa, Bos taurus
LTYMAAAAVGMLGASYAA

SEQ ID NO: 12697 - protein, 20 aa, Bos taurus
LLCGAVALGCALLLALKFTC

SEQ ID NO: 12698 - protein, 20 aa, Bos taurus
LVAVVVFGAVTAALVLSTVL

SEQ ID NO: 12699 - protein, 20 aa, Bos taurus
VALLSILVFIPSTVVVILLL

SEQ ID NO: 12700 - protein, 20 aa, Bos taurus
GMLCGVFAWGLFFVVIFLYF

SEQ ID NO: 12701 - protein, 20 aa, Bos taurus
FLCPVREAIQILFIFLIGTL

SEQ ID NO: 12702 - protein, 20 aa, Bos taurus
NLYITAPIFIILIVVGSIWL

SEQ ID NO: 12703 - protein, 20 aa, Bos taurus
FLMNPMVMMMVLPLLIFVLL

SEQ ID NO: 12704 - protein, 16 aa, Bos taurus
LFLLCISLALWSYFFH

SEQ ID NO: 12705 - protein, 17 aa, Bos taurus
AIAAGVCGALFIGYCIY

SEQ ID NO: 12706 - protein, 20 aa, Bos taurus
IFMYMFLAGLGLLVVVGLHQ

SEQ ID NO: 12707 - protein, 20 aa, Bos taurus
GIIAAVAVLSISLAAGILFA

SEQ ID NO: 12708 - protein, 20 aa, Bos taurus
ICVIVLLFILAVINLIITLV

SEQ ID NO: 12709 - protein, 20 aa, Bos taurus
AVPIYVPFLIVGSVFVAFIV

SEQ ID NO: 12710 - protein, 19 aa, Bos taurus
ALWIGTTSFMILVLPVVFE

SEQ ID NO: 12711 - protein, 20 aa, Bos taurus
GEVVIIVVVLLMWAAVIGLF

SEQ ID NO: 12712 - protein, 20 aa, Bos taurus
PYYASAFSMMLGLFIFSVVF

SEQ ID NO: 12713 - protein, 20 aa, Bos taurus
VAAPLLCLAAAVLVWGVLWV

SEQ ID NO: 12714 - protein, 20 aa, Bos taurus
VGAGVGAFTAVLLVALTCYF

SEQ ID NO: 12715 - protein, 20 aa, Bos taurus
MIIIISLGAICAVLLVIMVL

SEQ ID NO: 12716 - protein, 18 aa, Bos taurus
AWDLWSTLCMILFLVIEV

SEQ ID NO: 12717 - protein, 20 aa, Bos taurus
LILVIYFFFYASLAAVITLC

SEQ ID NO: 12718 - protein, 20 aa, Bos taurus
FYLTFPLIFGLFIILLVIFL

SEQ ID NO: 12719 - protein, 20 aa, Bos taurus
ILISALVIASTVILTVLGAV

SEQ ID NO: 12720 - protein, 23 aa, Bos taurus
PEITIVLLTAATLLSIWLAYMIP

SEQ ID NO: 12721 - protein, 20 aa, Bos taurus
TALIFGGFISLIGAAFYPIY

SEQ ID NO: 12722 - protein, 16 aa, Bos taurus
VFQSLVITLIAVMAFC

SEQ ID NO: 12723 - protein, 23 aa, Bos taurus
GVLVGISIASLSLVVALLALLCH

SEQ ID NO: 12724 - protein, 24 aa, Bos taurus
ARMWKALTYFVALPGVGVSMLNVF

SEQ ID NO: 12725 - protein, 28 aa, Bos taurus
IADALLYRATLILTVGGTAYAMYELAVA

SEQ ID NO: 12726 - protein, 23 aa, Bos taurus
TMDIAIGLTSCFLCFLLPSGWVL

SEQ ID NO: 12727 - protein, 16 aa, Bos taurus
AYQEIWVGTGLMAYIV

SEQ ID NO: 12728 - protein, 22 aa, Bos taurus
FLLPILGAALALLLLLLVLLFL

SEQ ID NO: 12729 - protein, 24 aa, Bos taurus
IYIWAPLVGTCGVLLLSLVITGIC

SEQ ID NO: 12730 - protein, 22 aa, Bos taurus
LIPLFIFIGAGGTGAALYVTRL

SEQ ID NO: 12731 - protein, 20 aa, Bos taurus
LFGFVAFMLFMFWVGETYPA

SEQ ID NO: 12732 - protein, 18 aa, Bos taurus
WLKVGLTLGTSVFLWIYL

SEQ ID NO: 12733 - protein, 20 aa, Bos taurus
MWFEVLPGIAVMGVCLFIPG

SEQ ID NO: 12734 - protein, 16 aa, Bos taurus
HWVHVLVPMGFVFGYY

SEQ ID NO: 12735 - protein, 20 aa, Bos taurus
FYILLTGIPVAIGITLINVF

SEQ ID NO: 12736 - protein, 19 aa, Bos taurus
GLHRQLLYITSFVFVGYYL

SEQ ID NO: 12737 - protein, 19 aa, Bos taurus
NGGLIFAALAFIVGLVIIL

SEQ ID NO: 12738 - protein, 22 aa, Bos taurus
WLRLLPFLGVLALLGYLAVRPF

SEQ ID NO: 12739 - protein, 27 aa, Bos taurus
AGLSTGALIAILLCVVILLAIVVLFIT

SEQ ID NO: 12740 - protein, 20 aa, Bos taurus
LIAGAIGTGAVIIIFCIALI

SEQ ID NO: 12741 - protein, 20 aa, Bos taurus
YIAYALVPVFFVMGLFGVLI

SEQ ID NO: 12742 - protein, 20 aa, Bos taurus
FWRLTVFFVSLSLLGVILIA

SEQ ID NO: 12743 - protein, 20 aa, Bos taurus
GVIAGGLVGLIFAVCLVGFM

SEQ ID NO: 12744 - protein, 20 aa, Bos taurus
LGGVVTIVVLLAIAFGVYKF

SEQ ID NO: 12745 - protein, 19 aa, Bos taurus
AVMGMVFILTLLLLGFINH

SEQ ID NO: 12746 - protein, 20 aa, Bos taurus
GGFSVFIQLMPIIVLILVSL

SEQ ID NO: 12747 - protein, 20 aa, Bos taurus
YFGFLILGVLLAGYIYVPLP

SEQ ID NO: 12748 - protein, 20 aa, Bos taurus
VIVALAVCGSILFLLIVLLL

SEQ ID NO: 12749 - protein, 18 aa, Bos taurus
IHYLFNTALFLIAWRLLI

SEQ ID NO: 12750 - protein, 20 aa, Bos taurus
IMAVALGAPALMLLAGGLFL

SEQ ID NO: 12751 - protein, 20 aa, Bos taurus
ILTLLLTVGQGFTIVVLGVM

SEQ ID NO: 12752 - protein, 22 aa, Bos taurus
LLPQLLLALTVASVFYTIWRIW

SEQ ID NO: 12753 - protein, 22 aa, Bos taurus
VNWWSTAQSLVIVLSGILQLYF

SEQ ID NO: 12754 - protein, 20 aa, Bos taurus
LLLVLGCSTLSLLIHQGAQL

SEQ ID NO: 12755 - protein, 20 aa, Bos taurus
LGALRLLLFKLLLLDVLLTC

SEQ ID NO: 12756 - protein, 20 aa, Bos taurus
ILLTLCLVLLIGLAALGLVF

SEQ ID NO: 12757 - protein, 20 aa, Bos taurus
LFVLLLLIVLLVNFALTIWI

SEQ ID NO: 12758 - protein, 20 aa, Bos taurus
LPSLLVVIAAIFIGFFLGKF

SEQ ID NO: 12759 - protein, 22 aa, Bos taurus
YTVFALATLLSGLLLGLFMIFV

SEQ ID NO: 12760 - protein, 20 aa, Bos taurus
LLVGALLGAGAGVGTALFAL

SEQ ID NO: 12761 - protein, 22 aa, Bos taurus
GIVGLCGLVSSILSILTLICPW

SEQ ID NO: 12762 - protein, 20 aa, Bos taurus
LIAAVIGTIQIAVICVVVLC

SEQ ID NO: 12763 - protein, 16 aa, Bos taurus
VAAWFFASLAAVAESL

SEQ ID NO: 12764 - protein, 20 aa, Bos taurus
YLLDVFLFLLVVTLGTMWLC

SEQ ID NO: 12765 - protein, 20 aa, Bos taurus
LKAAVIVACAFTAFLIACLL

SEQ ID NO: 12766 - protein, 20 aa, Bos taurus
LGYVLGITMMVIIVVIGAGI

SEQ ID NO: 12767 - protein, 20 aa, Bos taurus
VATIIVVDICVTLGLLLLVY

SEQ ID NO: 12768 - protein, 24 aa, Bos taurus
TINIVLGVLAILGLVTLAAASVYV

SEQ ID NO: 12769 - protein, 20 aa, Bos taurus
LTLGILGGLGTVALLIGVIV

SEQ ID NO: 12770 - protein, 20 aa, Bos taurus
LALAILLPLGLVIILGSGVY

SEQ ID NO: 12771 - protein, 20 aa, Bos taurus
IIVGAFVGTLIGVIIIISVV

SEQ ID NO: 12772 - protein, 20 aa, Bos taurus
LVTLAVPSAVALVLFLILAY

SEQ ID NO: 12773 - protein, 20 aa, Bos taurus
FLVFWLCLPVALLLFLLIIW

SEQ ID NO: 12774 - protein, 20 aa, Bos taurus
VVIVAIGVLATIFLASFAAL

SEQ ID NO: 12775 - protein, 20 aa, Bos taurus
MGLAVGIALLILLIVLLVIF

SEQ ID NO: 12776 - protein, 20 aa, Bos taurus
LYMLFLLVLVFFLMGLVGFM

SEQ ID NO: 12777 - protein, 20 aa, Bos taurus
FWSMVNLVVMVVVSAIQVYM

SEQ ID NO: 12778 - protein, 20 aa, Bos taurus
AAAGLTLGVTIALAGVVALA

SEQ ID NO: 12779 - protein, 19 aa, Bos taurus
FGLLRVFSIVIPFLYVGTL

SEQ ID NO: 12780 - protein, 17 aa, Bos taurus
ISYVMIALTVAGCVLMV

SEQ ID NO: 12781 - protein, 20 aa, Bos taurus
LGLLTLCVMLLIGLVTLGIM

SEQ ID NO: 12782 - protein, 22 aa, Bos taurus
WLSHYIMSLFTFLTATVAYLFL

SEQ ID NO: 12783 - protein, 22 aa, Bos taurus
NIIKFTGSLILGGSLFITYEVL

SEQ ID NO: 12784 - protein, 20 aa, Bos taurus
PWVSTEVLAAAIGLVIYYLA

SEQ ID NO: 12785 - protein, 20 aa, Bos taurus
LLLLLGLLGFLALLALMSRL

SEQ ID NO: 12786 - protein, 20 aa, Bos taurus
LIFIIINWTAVKDFWAKAST

SEQ ID NO: 12787 - protein, 20 aa, Bos taurus
ILPLVGMAMVPALLGLIGYH

SEQ ID NO: 12788 - protein, 20 aa, Bos taurus
VFLPSLLLSHLLAIGLGIYI

SEQ ID NO: 12789 - protein, 18 aa, Bos taurus
MAQVCLNTKLAKIKSKAL

SEQ ID NO: 12790 - protein, 20 aa, Bos taurus
IKAIMALVAVILLLVIIILI

SEQ ID NO: 12791 - protein, 22 aa, Bos taurus
LSFITDFFWGIAEFVVLFFRTL

SEQ ID NO: 12792 - protein, 20 aa, Bos taurus
FPVWVVVGIVTAVVLGLTLL

SEQ ID NO: 12793 - protein, 20 aa, Bos taurus
LLCGVAVGLIVAFFILSYLL

SEQ ID NO: 12794 - protein, 20 aa, Bos taurus
SWPVIVAALLLSCFVLFGLG

SEQ ID NO: 12795 - protein, 20 aa, Bos taurus
VLLASLGVGLLTLLGVALGA

SEQ ID NO: 12796 - protein, 20 aa, Bos taurus
GGFILGLWALIIMVFFKTYG

SEQ ID NO: 12797 - protein, 20 aa, Bos taurus
YSFSGAFLFSLGFLVAGLCY

SEQ ID NO: 12798 - protein, 20 aa, Bos taurus
IWAILAFLGLALTISLIFNI

SEQ ID NO: 12799 - protein, 20 aa, Bos taurus
VALWLARLLGAGGTVSVIYI

SEQ ID NO: 12800 - protein, 22 aa, Bos taurus
GIRSWSLLVGILSIGLAAAYYS

SEQ ID NO: 12801 - protein, 20 aa, Bos taurus
FAFSLSVMAALTFGCFITTA

SEQ ID NO: 12802 - protein, 20 aa, Bos taurus
FTYLIVVLIGISITGGLFYT

SEQ ID NO: 12803 - protein, 22 aa, Bos taurus
GFVMGCAVGMAAGALFGTFSCL

SEQ ID NO: 12804 - protein, 16 aa, Bos taurus
VGQIGFHRQKDVKIVT

SEQ ID NO: 12805 - protein, 16 aa, Bos taurus
MIMVILLLLVAIVVVA

SEQ ID NO: 12806 - protein, 20 aa, Bos taurus
FSLLLGLGAALYLGYYWTWV

SEQ ID NO: 12807 - protein, 20 aa, Bos taurus
FGTVIAIGVTLFVIAVVTVI

SEQ ID NO: 12808 - protein, 20 aa, Bos taurus
IVTGLGIGALVLAIYGYTFY

SEQ ID NO: 12809 - protein, 20 aa, Bos taurus
LVGMAIVGGMALGVAGLAGL

SEQ ID NO: 12810 - protein, 22 aa, Bos taurus
AGIIAVIVVVVVAIIAGIIVLV

SEQ ID NO: 12811 - protein, 20 aa, Bos taurus
GWILTVTLVLSVMVLLWICC

SEQ ID NO: 12812 - protein, 20 aa, Bos taurus
FITSTAILPLLLGCVGLFSL

SEQ ID NO: 12813 - protein, 28 aa, Bos taurus
FQKIAMATAIGFAIMGFIGFFVKLIHIP

SEQ ID NO: 12814 - protein, 20 aa, Bos taurus
IEPIIAACVVVFLTLVFGVI

SEQ ID NO: 12815 - protein, 16 aa, Bos taurus
MKAVMLGACFLIDFMF

SEQ ID NO: 12816 - protein, 20 aa, Bos taurus
TVVAVGLTIAAAGFAGRYAL

SEQ ID NO: 12817 - protein, 20 aa, Bos taurus
YVMASVFVCLLLSGLAVFFL

SEQ ID NO: 12818 - protein, 20 aa, Bos taurus
FYLLEFLLWISTFLPGLVGW

SEQ ID NO: 12819 - protein, 17 aa, Bos taurus
VMYSITVAFWLLNSWLW

SEQ ID NO: 12820 - protein, 20 aa, Bos taurus
AVIAGGVIGFLFAIFLILLL

SEQ ID NO: 12821 - protein, 20 aa, Bos taurus
FWLPIGCAAFVTVCVFGCVL

SEQ ID NO: 12822 - protein, 20 aa, Bos taurus
GGLGVFVQLMPILILILVSA

SEQ ID NO: 12823 - protein, 20 aa, Bos taurus
VVTVTGISLCLFIIVATVLI

SEQ ID NO: 12824 - protein, 20 aa, Bos taurus
FLDWAAFGVMTLPSIGVPLL

SEQ ID NO: 12825 - protein, 16 aa, Bos taurus
FGAGFGLVGVGTALAL

SEQ ID NO: 12826 - protein, 20 aa, Bos taurus
GVALGVFMTIGFALQLLGGP

SEQ ID NO: 12827 - protein, 20 aa, Bos taurus
WAVLKLLLLLLLCVAGGLVA

SEQ ID NO: 12828 - protein, 20 aa, Bos taurus
VFLAVSICLVTSSLIIFFLF

SEQ ID NO: 12829 - protein, 20 aa, Bos taurus
ALAIGSACALMVIIVIVVVL

SEQ ID NO: 12830 - protein, 20 aa, Bos taurus
FCQTGAVLFLLVTVIVNIKL

SEQ ID NO: 12831 - protein, 20 aa, Bos taurus
LAFCLCVMATVFLLITLQVV

SEQ ID NO: 12832 - protein, 20 aa, Bos taurus
LLAIFLSAVFLYYVLHCILW

SEQ ID NO: 12833 - protein, 12 aa, Bos taurus
WTICTISLLLIF

SEQ ID NO: 12834 - protein, 20 aa, Bos taurus
LGLAVLVLVALMGFLLEDWL

SEQ ID NO: 12835 - protein, 20 aa, Bos taurus
MIIITSILSSLAGLLLLAFL

SEQ ID NO: 12836 - protein, 20 aa, Bos taurus
VVFFFGFSIVLVLGSTFVAY

SEQ ID NO: 12837 - protein, 20 aa, Bos taurus
GFCVAFILSLVLTWAVLFFM

SEQ ID NO: 12838 - protein, 20 aa, Bos taurus
IGALAASGSLLLVLAIAGPV

SEQ ID NO: 12839 - protein, 22 aa, Bos taurus
DIVIPVVAVTLILGALGTAGYV

SEQ ID NO: 12840 - protein, 18 aa, Bos taurus
VLLFTMLLSSCITNLWLW

SEQ ID NO: 12841 - protein, 20 aa, Bos taurus
GVAVMAVAISVALLLLVVAV

SEQ ID NO: 12842 - protein, 20 aa, Bos taurus
ILVICLIAVMVIFIILVVSI

SEQ ID NO: 12843 - protein, 20 aa, Bos taurus
MLSGIGGFVLGLIFLGLGLI

SEQ ID NO: 12844 - protein, 22 aa, Bos taurus
LPLASSALTLLLGALTSLFLWY

SEQ ID NO: 12845 - protein, 22 aa, Bos taurus
PVMAFGLITISLCVAYIGYLHA

SEQ ID NO: 12846 - protein, 20 aa, Bos taurus
SLVLAVLLVVIAVLAFNYWS

SEQ ID NO: 12847 - protein, 16 aa, Bos taurus
GVSLLSLGTCLGLAWF

SEQ ID NO: 12848 - protein, 20 aa, Bos taurus
CLFLGILSIPPFANYLVFLL

SEQ ID NO: 12849 - protein, 20 aa, Bos taurus
IAVVITVVFLTLLSVVILIF

SEQ ID NO: 12850 - protein, 22 aa, Bos taurus
EAWNEATNVYLVVILVSFGLFM

SEQ ID NO: 12851 - protein, 22 aa, Bos taurus
YAPYVTFPVAFVVGAVGYHLEW

SEQ ID NO: 12852 - protein, 20 aa, Bos taurus
LSFALFLVLVLLVTSAIILL

SEQ ID NO: 12853 - protein, 20 aa, Bos taurus
VGLIIVLIISLALVSFVIFL

SEQ ID NO: 12854 - protein, 20 aa, Bos taurus
FPLLLYILAAKTLILCLAFA

SEQ ID NO: 12855 - protein, 20 aa, Bos taurus
AMLVTMFGWFTMVISYVVYY

SEQ ID NO: 12856 - protein, 20 aa, Bos taurus
VAMLVTMFGWFAMVITYVVY

SEQ ID NO: 12857 - protein, 20 aa, Bos taurus
IGLFLILLAEGVILGGVLLL

SEQ ID NO: 12858 - protein, 20 aa, Bos taurus
WYFWFLLMMGVLFCCGAGFF

SEQ ID NO: 12859 - protein, 19 aa, Bos taurus
ACYIMIGLTIIACFAVIAS

SEQ ID NO: 12860 - protein, 20 aa, Bos taurus
IIAILSVLLAVLLAALLALL

SEQ ID NO: 12861 - protein, 20 aa, Bos taurus
IGALIGLGIAALVLLAFVIS

SEQ ID NO: 12862 - protein, 20 aa, Bos taurus
ALGLILIGYMLITVIFISIH

SEQ ID NO: 12863 - protein, 18 aa, Bos taurus
SIRNFLIYVALLRVTPFI

SEQ ID NO: 12864 - protein, 17 aa, Bos taurus
VFRMTIYLTFPVAMFWI

SEQ ID NO: 12865 - protein, 20 aa, Bos taurus
WALGWTCGGLLFLITSICLF

SEQ ID NO: 12866 - protein, 16 aa, Bos taurus
WLGSAPWWWLGTATWW

SEQ ID NO: 12867 - protein, 20 aa, Bos taurus
VLIPVHLITSAVWFGTFYYA

SEQ ID NO: 12868 - protein, 20 aa, Bos taurus
AVAFVGGLVGGPPGLAVGGA

SEQ ID NO: 12869 - protein, 20 aa, Bos taurus
TRLHAAVAIACIVMAFYVLF

SEQ ID NO: 12870 - protein, 20 aa, Bos taurus
FIMVMGAMLLVYLHQAGWFP

SEQ ID NO: 12871 - protein, 20 aa, Bos taurus
IAVGIGVAGGVTGGVLVSIV

SEQ ID NO: 12872 - protein, 20 aa, Bos taurus
VSIGFGSMFFLKYLCLWLIA

SEQ ID NO: 12873 - protein, 20 aa, Bos taurus
ILACCLFLSVLVMLWLSCST

SEQ ID NO: 12874 - protein, 17 aa, Bos taurus
SPYVAVCCIVMAFSILF

SEQ ID NO: 12875 - protein, 20 aa, Bos taurus
GVVTVIVILIAIAALGALIL

SEQ ID NO: 12876 - protein, 20 aa, Bos taurus
VIVIFFWVMLWFLGLPAFGL

SEQ ID NO: 12877 - protein, 18 aa, Bos taurus
WVLALVFGLSLVYFLTST

SEQ ID NO: 12878 - protein, 20 aa, Bos taurus
ALLTLLLGATLGLLLYAQQE

SEQ ID NO: 12879 - protein, 20 aa, Bos taurus
PWWVVLPLSFSLMALVIWCF

SEQ ID NO: 12880 - protein, 20 aa, Bos taurus
LVLGFFLILFCGLCCLTAAC

SEQ ID NO: 12881 - protein, 22 aa, Bos taurus
FSTSMMLLTVYGGYLCSVRAYH

SEQ ID NO: 12882 - protein, 20 aa, Bos taurus
VVQIAVMCVLSLTVVFGIFF

SEQ ID NO: 12883 - protein, 17 aa, Bos taurus
LTACILLALALGMCCGQ

SEQ ID NO: 12884 - protein, 17 aa, Bos taurus
INQVLLFLLIVTLCGIL

SEQ ID NO: 12885 - protein, 20 aa, Bos taurus
AAFFLSLFACLLVVFVVSFI

SEQ ID NO: 12886 - protein, 20 aa, Bos taurus
LPFLFWFSVASLITLFHLFL

SEQ ID NO: 12887 - protein, 15 aa, Bos taurus
FAIRWGFIPLVIYLG

SEQ ID NO: 12888 - protein, 20 aa, Bos taurus
GISITMILMAWMVIAVILFL

SEQ ID NO: 12889 - protein, 20 aa, Bos taurus
WMQGLIAVAVFLVLVAIAFA

SEQ ID NO: 12890 - protein, 22 aa, Bos taurus
TLRYGVPMLLLIVGGSFGLREF

SEQ ID NO: 12891 - protein, 22 aa, Bos taurus
AFAVLLSMVLCTVMLFLLQLKF

SEQ ID NO: 12892 - protein, 20 aa, Bos taurus
ALPLGALYTAAAVAFVLYKC

SEQ ID NO: 12893 - protein, 20 aa, Bos taurus
LVPVGVGIAGALFILGALYS

SEQ ID NO: 12894 - protein, 20 aa, Bos taurus
EELEKELYQEAQECLTLLSQ

SEQ ID NO: 12895 - protein, 20 aa, Bos taurus
LLIIVIGTLITGYMVSCTCL

SEQ ID NO: 12896 - protein, 16 aa, Bos taurus
MLLLIQGLSLLLLFDH

SEQ ID NO: 12897 - protein, 20 aa, Bos taurus
IFVVMIFFRLLGYVLFYLQY

SEQ ID NO: 12898 - protein, 20 aa, Bos taurus
VLLWLVLLGLFVELEFGLAY

SEQ ID NO: 12899 - protein, 20 aa, Bos taurus
ILLLLGLIICINIGINMVTL

SEQ ID NO: 12900 - protein, 17 aa, Bos taurus
LGTSTCLTACWTALCCC

SEQ ID NO: 12901 - protein, 20 aa, Bos taurus
VGYPFYTYGSIIIIALIIWQ

SEQ ID NO: 12902 - protein, 20 aa, Bos taurus
TVVLPTLAVVVLLIVVFVYV

SEQ ID NO: 12903 - protein, 20 aa, Bos taurus
FVLASFALALLLPVFLAVAA

SEQ ID NO: 12904 - protein, 22 aa, Bos taurus
TLRIGGLVFAVVLFSVGILLIL

SEQ ID NO: 12905 - protein, 20 aa, Bos taurus
LLHAAMGVGSALALLSCSAL

SEQ ID NO: 12906 - protein, 19 aa, Bos taurus
SFLKGVMLGSIFCALITML

SEQ ID NO: 12907 - protein, 20 aa, Bos taurus
FRIFIALWNVFMMFCMIVLF

SEQ ID NO: 12908 - protein, 20 aa, Bos taurus
YVQVFSALIVIIAGAFVITI

SEQ ID NO: 12909 - protein, 22 aa, Bos taurus
LTSIMCASYAALIYLTVCVNAV

SEQ ID NO: 12910 - protein, 20 aa, Bos taurus
GPWLLALFVFVVCGSAIFQI

SEQ ID NO: 12911 - protein, 20 aa, Bos taurus
ATFLMLAAFLTIPLLGALVL

SEQ ID NO: 12912 - protein, 20 aa, Bos taurus
VQTVGMTLATILFLLGILII

SEQ ID NO: 12913 - protein, 20 aa, Bos taurus
GWIAAAVGWSLLFLTLILLC

SEQ ID NO: 12914 - protein, 20 aa, Bos taurus
GPVAFLTCLGLAAGLALLIY

SEQ ID NO: 12915 - protein, 20 aa, Bos taurus
VNVVLVMAYGSLVFVLLFIF

SEQ ID NO: 12916 - protein, 20 aa, Bos taurus
FAIFAVTFLLALVGAVLYLY

SEQ ID NO: 12917 - protein, 20 aa, Bos taurus
IVILVLAVALFLLVLHHNFL

SEQ ID NO: 12918 - protein, 20 aa, Bos taurus
AAGIPSLVATALLVALLLIL

SEQ ID NO: 12919 - protein, 22 aa, Bos taurus
LSCLLAMAYVSSVALAVASMAV

SEQ ID NO: 12920 - protein, 20 aa, Bos taurus
VVAFFSLALLLAPLVETLIL

SEQ ID NO: 12921 - protein, 20 aa, Bos taurus
AFIQLLPVLVIVIISVITQL

SEQ ID NO: 12922 - protein, 16 aa, Bos taurus
VVIVGGGVLGLSVAYW

SEQ ID NO: 12923 - protein, 20 aa, Bos taurus
LNFIFIPIVMGMIFTLFTIS

SEQ ID NO: 12924 - protein, 20 aa, Bos taurus
NMLLSVAIFLLLTVIYAYWA

SEQ ID NO: 12925 - protein, 20 aa, Bos taurus
VLIAVTLFVSGIAITVFVIF

SEQ ID NO: 12926 - protein, 20 aa, Bos taurus
ILAFSVLVVFTATVVLLLLI

SEQ ID NO: 12927 - protein, 20 aa, Bos taurus
AGAVTLGIGFFALASALWFL

SEQ ID NO: 12928 - protein, 20 aa, Bos taurus
LLLLVAFTLVAFLFHVLLAP

SEQ ID NO: 12929 - protein, 20 aa, Bos taurus
VLLLIFVIALLSLGIAYYVS

SEQ ID NO: 12930 - protein, 20 aa, Bos taurus
MWFVLTLLFTSLVCWQWGLF

SEQ ID NO: 12931 - protein, 20 aa, Bos taurus
AALGFIGLLFAVLGIIMIVM

SEQ ID NO: 12932 - protein, 20 aa, Bos taurus
ILSILGFSCIIAVIALLALG

SEQ ID NO: 12933 - protein, 24 aa, Bos taurus
RWMLVIFCLAFVLSWLFFGCVFWL

SEQ ID NO: 12934 - protein, 20 aa, Bos taurus
VGVAGSGAGIGTVFGSLIIG

SEQ ID NO: 12935 - protein, 20 aa, Bos taurus
LFLILNIAIFFVMLAMQLTY

SEQ ID NO: 12936 - protein, 21 aa, Bos taurus
GLIAGAVIGAVLAVFGGILMP

SEQ ID NO: 12937 - protein, 20 aa, Bos taurus
VGVAGSGAGIGTVFGSLIIG

SEQ ID NO: 12938 - protein, 20 aa, Bos taurus
EVVPIASIAILLLTGFLLLV

SEQ ID NO: 12939 - protein, 20 aa, Bos taurus
FWAVLWLCTFGMMYWQFGQL

SEQ ID NO: 12940 - protein, 30 aa, Bos taurus
PIMEELLHFHDHTLMIVFLISSLVLYIISL

SEQ ID NO: 12941 - protein, 20 aa, Bos taurus
LAAVGGAVGAGLMGLAGGVV

SEQ ID NO: 12942 - protein, 20 aa, Bos taurus
CSVTFHVIAITCVVWSLYVL

SEQ ID NO: 12943 - protein, 20 aa, Bos taurus
VLPTFFIIGLIFIPIGIGIF

SEQ ID NO: 12944 - protein, 20 aa, Bos taurus
ILALASVFWSISYYSSPFAF

SEQ ID NO: 12945 - protein, 22 aa, Bos taurus
MWLPLLLGVLLWAALWLLRDRQ

SEQ ID NO: 12946 - protein, 20 aa, Bos taurus
FKMYFLWTALFWGGFLFYFL

SEQ ID NO: 12947 - protein, 20 aa, Bos taurus
LCCDVVCFLFITPLAAISGW

SEQ ID NO: 12948 - protein, 20 aa, Bos taurus
LWEEQGGLMGPFSFLLLVLL

SEQ ID NO: 12949 - protein, 20 aa, Bos taurus
VGVAGSGAGIGTVFGSLIIG

SEQ ID NO: 12950 - protein, 20 aa, Bos taurus
TVQLLILAYVIGWVFVWEKG

SEQ ID NO: 12951 - protein, 20 aa, Bos taurus
LAALPVAGALIGGVVGGPIG

SEQ ID NO: 12952 - protein, 22 aa, Bos taurus
ILFTASKSCAIMSTHIVACLLL

SEQ ID NO: 12953 - protein, 20 aa, Bos taurus
WLLSFLLFAQVCLGIIVFLI

SEQ ID NO: 12954 - protein, 18 aa, Bos taurus
VISVLQWVLSFLVLGVAC

SEQ ID NO: 12955 - protein, 20 aa, Bos taurus
MAFYNGWILFLAVLAIPVCA

SEQ ID NO: 12956 - protein, 20 aa, Bos taurus
LFGDMVCFLFITPLATISGW

SEQ ID NO: 12957 - protein, 20 aa, Bos taurus
VFTALLGAAAVSGLTALLLV

SEQ ID NO: 12958 - protein, 20 aa, Bos taurus
ISLRLTVLWGLGVLIRYCLL

SEQ ID NO: 12959 - protein, 20 aa, Bos taurus
FLALPIIMVVAFSMCIICLL

SEQ ID NO: 12960 - protein, 20 aa, Bos taurus
ALYCQLLSFLLTLALTEALV

SEQ ID NO: 12961 - protein, 24 aa, Bos taurus
RWNLFIFILTYTVAWLFMASMWWV

SEQ ID NO: 12962 - protein, 20 aa, Bos taurus
LWILFTLTAVALIFWQCALL

SEQ ID NO: 12963 - protein, 24 aa, Bos taurus
RFNLLVFTMVYTITWLFFGFIWWL

SEQ ID NO: 12964 - protein, 20 aa, Bos taurus
VLVLIAVLPVLLLQITVGLV

SEQ ID NO: 12965 - protein, 20 aa, Bos taurus
LGVAMVVGAVITYYILGTTV

SEQ ID NO: 12966 - protein, 20 aa, Bos taurus
LPVVIFTTFWGLIGIAGPWF

SEQ ID NO: 12967 - protein, 20 aa, Bos taurus
CVIPFAVVVLITGTVVTAVA

SEQ ID NO: 12968 - protein, 20 aa, Bos taurus
WLSVLECVEVFMEMGATKVW

SEQ ID NO: 12969 - protein, 20 aa, Bos taurus
LYDFFLACHPLMPIYFAAVI

SEQ ID NO: 12970 - protein, 20 aa, Bos taurus
SIFNFCAIPQVMAIATLAAC

SEQ ID NO: 12971 - protein, 20 aa, Bos taurus
CCAYITIGMMCIFIGIGLTV

SEQ ID NO: 12972 - protein, 20 aa, Bos taurus
HLLLLVLLIILILPFIYPGV

SEQ ID NO: 12973 - protein, 20 aa, Bos taurus
ACGIVLSAWGVIMLIMLGIF

SEQ ID NO: 12974 - protein, 20 aa, Bos taurus
YLMSTHFWGPVANWGLPIAA

SEQ ID NO: 12975 - protein, 24 aa, Bos taurus
MLLIFSLAFLASWLLFGVIFWVIA

SEQ ID NO: 12976 - protein, 20 aa, Bos taurus
TLFVVIFITYVIAGVTGFIG

SEQ ID NO: 12977 - protein, 20 aa, Bos taurus
WQTPLCSLLTCLGLNVLFLT

SEQ ID NO: 12978 - protein, 20 aa, Bos taurus
GGATVTIVSGLLMLLLFLSE

SEQ ID NO: 12979 - protein, 21 aa, Bos taurus
TYATTSIGGAAGLVVSAYSVA

SEQ ID NO: 12980 - protein, 20 aa, Bos taurus
TLKTLLFFTALMITVPIGLY

SEQ ID NO: 12981 - protein, 20 aa, Bos taurus
FLAAYPFVNMAWEGWFLVQQ

SEQ ID NO: 12982 - protein, 20 aa, Bos taurus
GFQLPWTRLLLLVLVFAIGF

SEQ ID NO: 12983 - protein, 20 aa, Bos taurus
GLTIFSMLCCFWPLGIAAFY

SEQ ID NO: 12984 - protein, 20 aa, Bos taurus
LSLASLLFFTVLLSDHLWFC

SEQ ID NO: 12985 - protein, 20 aa, Bos taurus
LLLLALVLGTILLPAVTMLG

SEQ ID NO: 12986 - protein, 20 aa, Bos taurus
VLGHVNNILISAVLPTAFRV

SEQ ID NO: 12987 - protein, 20 aa, Bos taurus
AALFLLLATALTYIPPLLVA

SEQ ID NO: 12988 - protein, 23 aa, Bos taurus
GIGYPAGFPMGYAAAAPAYSPNM

SEQ ID NO: 12989 - protein, 20 aa, Bos taurus
VPLIVMSVFWGIVGFLVPWF

SEQ ID NO: 12990 - protein, 17 aa, Bos taurus
WLYYQYQIISCCAVLEP

SEQ ID NO: 12991 - protein, 21 aa, Bos taurus
ICLTLASLNRVIYFICDTVLF

SEQ ID NO: 12992 - protein, 20 aa, Bos taurus
IWLSYVLAIGLLHVVLLSIP

SEQ ID NO: 12993 - protein, 20 aa, Bos taurus
AFTLYSLLQAALLCVNAIAV

SEQ ID NO: 12994 - protein, 20 aa, Bos taurus
VFSVLLIFIYLLLMAVAVFL

SEQ ID NO: 12995 - protein, 20 aa, Bos taurus
MVSWIISRLVVLIFGTLYPA

SEQ ID NO: 12996 - protein, 20 aa, Bos taurus
GYMLSSLTCGMAPVTSIMEG

SEQ ID NO: 12997 - protein, 22 aa, Bos taurus
LGMIFSMCGLMLKLKWCAWVAV

SEQ ID NO: 12998 - protein, 20 aa, Bos taurus
ASRGVVGIFLLSALPLLCLE

SEQ ID NO: 12999 - protein, 18 aa, Bos taurus
SLWKGLVGIGLFALAHAA

SEQ ID NO: 13000 - protein, 20 aa, Bos taurus
LLSLYLLFGYGAPLLCSLIG

SEQ ID NO: 13001 - protein, 20 aa, Bos taurus
VFPHLTVVLLAIGMFFTAWF

SEQ ID NO: 13002 - protein, 16 aa, Bos taurus
MLQTTFLDSINTLPTT

SEQ ID NO: 13003 - protein, 18 aa, Bos taurus
FLPKIGVITVSGLAGFIS

SEQ ID NO: 13004 - protein, 20 aa, Bos taurus
LIVFISVCTALLAEGITWVL

SEQ ID NO: 13005 - protein, 20 aa, Bos taurus
MLLIVVSVCTATGAWNWLID

SEQ ID NO: 13006 - protein, 20 aa, Bos taurus
LWALALLGSTWAALTMGALG

SEQ ID NO: 13007 - protein, 20 aa, Bos taurus
MVSWMICRLVVLVFGMLYPA

SEQ ID NO: 13008 - protein, 25 aa, Bos taurus
NGILRGVYPGSPTSWLVVVMATAGS

SEQ ID NO: 13009 - protein, 20 aa, Bos taurus
VLFLIGAFLIIIGSLLLAGY

SEQ ID NO: 13010 - protein, 16 aa, Bos taurus
MSWFYYQYLLVTALYM

SEQ ID NO: 13011 - protein, 20 aa, Bos taurus
LLQFGVFFCTILLLLWVSVF

SEQ ID NO: 13012 - protein, 20 aa, Bos taurus
NWSLIGSVLGALIGVAGSTY

SEQ ID NO: 13013 - protein, 20 aa, Bos taurus
LVVLQQMFFGVIICALATLA

SEQ ID NO: 13014 - protein, 20 aa, Bos taurus
SLQALPATVLGALGALGSEF

SEQ ID NO: 13015 - protein, 20 aa, Bos taurus
FIYCLVLLAFANGLNQLYFY

SEQ ID NO: 13016 - protein, 20 aa, Bos taurus
LVIVVWSVAALIWPVPIIAG

SEQ ID NO: 13017 - protein, 20 aa, Bos taurus
GLAGTGASLWFVAGLGLLYA

SEQ ID NO: 13018 - protein, 20 aa, Bos taurus
CLLLTLLIHACGAVVAWCRL

SEQ ID NO: 13019 - protein, 16 aa, Bos taurus
TTVLAGTACLFTPLAL

SEQ ID NO: 13020 - protein, 20 aa, Bos taurus
GKTYQAHSFVSAFIGGLLVF

SEQ ID NO: 13021 - protein, 20 aa, Bos taurus
FFAVLGLFCAGQGVFWASLA

SEQ ID NO: 13022 - protein, 20 aa, Bos taurus
LISLAFLPYIFAQNNVIFGS

SEQ ID NO: 13023 - protein, 20 aa, Bos taurus
CIFLGTVLGGVYILGKYGQK

SEQ ID NO: 13024 - protein, 20 aa, Bos taurus
MPVYVFLGAIPIIVIPYFLV

SEQ ID NO: 13025 - protein, 20 aa, Bos taurus
LVVALVSVFLVFGFMFTVSG

SEQ ID NO: 13026 - protein, 22 aa, Bos taurus
SLPMLTVLIPLVSLAGLFYSAS

SEQ ID NO: 13027 - protein, 20 aa, Bos taurus
PALWFSHSMFMGFYLLSFLL

SEQ ID NO: 13028 - protein, 20 aa, Bos taurus
VVLASFLLLLLGLVLILTGV

SEQ ID NO: 13029 - protein, 20 aa, Bos taurus
LLLLILPYFTIFLLYLTIIF

SEQ ID NO: 13030 - protein, 20 aa, Bos taurus
ALGVGLLHIVLLSIPFFSVP

SEQ ID NO: 13031 - protein, 20 aa, Bos taurus
MGWIGVGLYLLASAAAFYYV

SEQ ID NO: 13032 - protein, 20 aa, Bos taurus
PLWAGLLLASGTTLFCTTFY

SEQ ID NO: 13033 - protein, 20 aa, Bos taurus
LGLVALSLIIFTYYTAWVIL

SEQ ID NO: 13034 - protein, 19 aa, Bos taurus
YLASTHFWGPVANWGLPLA

SEQ ID NO: 13035 - protein, 20 aa, Bos taurus
ILSGFFAIGLFCLGMGIILL

SEQ ID NO: 13036 - protein, 20 aa, Bos taurus
SLLTVFLAVVCITALMLPTL

SEQ ID NO: 13037 - protein, 20 aa, Bos taurus
YTGHYFITTLLYSFFLGCFG

SEQ ID NO: 13038 - protein, 20 aa, Bos taurus
VVLWTLVCLPVVFLLSFVVS

SEQ ID NO: 13039 - protein, 20 aa, Bos taurus
LLLPQNQFAMFLYCFIFIHI

SEQ ID NO: 13040 - protein, 19 aa, Bos taurus
YPANSIVVVGGCPVCRVGV

SEQ ID NO: 13041 - protein, 20 aa, Bos taurus
LPLTLIYCFAFLTEMTHFIL

SEQ ID NO: 13042 - protein, 20 aa, Bos taurus
ILNVTLIVSGVVFFVNVGMV

SEQ ID NO: 13043 - protein, 20 aa, Bos taurus
GGIFSVTKGAVGATIGGVAW

SEQ ID NO: 13044 - protein, 20 aa, Bos taurus
AALFFATVVIVLGLPLWWKT

SEQ ID NO: 13045 - protein, 20 aa, Bos taurus
SFLLFLLMGTVSVAFLLLPL

SEQ ID NO: 13046 - protein, 22 aa, Bos taurus
AEQMFQGIILFSAIVGFIYGYL

SEQ ID NO: 13047 - protein, 20 aa, Bos taurus
YVLLSILLCLLASGLVVFFL

SEQ ID NO: 13048 - protein, 20 aa, Bos taurus
FYRSLLFWKNLLAMAALLVM

SEQ ID NO: 13049 - protein, 20 aa, Bos taurus
IWLAYIILVGLLHVVLLSIP

SEQ ID NO: 13050 - protein, 20 aa, Bos taurus
ALTVAALPPGLYCYSQGLMP

SEQ ID NO: 13051 - protein, 20 aa, Bos taurus
IIIDYLSLSSIWNYLQATLL

SEQ ID NO: 13052 - protein, 18 aa, Bos taurus
GVSTFVTGTGATFGLQML

SEQ ID NO: 13053 - protein, 20 aa, Bos taurus
AFAVVFYVVVWANIYSTSQM

SEQ ID NO: 13054 - protein, 20 aa, Bos taurus
LMLALLTNFTLATLLVIIAF

SEQ ID NO: 13055 - protein, 20 aa, Bos taurus
MSMVYMNIMMAFTVSLVGLL

SEQ ID NO: 13056 - protein, 29 aa, Bos taurus
LPMAMSICHRGTGIALSAGVSLFGLSALL

SEQ ID NO: 13057 - protein, 20 aa, Bos taurus
ILLAALSVLSACQQSYFAMQ

SEQ ID NO: 13058 - protein, 20 aa, Bos taurus
WVTVFLTEYAGPLFIYLLFY

SEQ ID NO: 13059 - protein, 20 aa, Bos taurus
ALPAAGFLYWVGASTVAYLA

SEQ ID NO: 13060 - protein, 20 aa, Bos taurus
FGSPRLACYTLGGAILLLNV

SEQ ID NO: 13061 - protein, 20 aa, Bos taurus
WCCVVLCFSLIAHNMAHLLL

SEQ ID NO: 13062 - protein, 20 aa, Bos taurus
WTVTAMVLAQLLACWLAQGL

SEQ ID NO: 13063 - protein, 20 aa, Bos taurus
MYYHWLTVIAVPVFYNWCLL

SEQ ID NO: 13064 - protein, 20 aa, Bos taurus
VTILFSALACLLVLALAWVS

SEQ ID NO: 13065 - protein, 20 aa, Bos taurus
VLVNNAGVGLVGPLEGLSLA

SEQ ID NO: 13066 - protein, 20 aa, Bos taurus
FWAVLMLLGVVAVVTASFLI

SEQ ID NO: 13067 - protein, 17 aa, Bos taurus
GTSLALSSLLSLLLFAG

SEQ ID NO: 13068 - protein, 20 aa, Bos taurus
VLVAVVVSLALIATLVYALF

SEQ ID NO: 13069 - protein, 20 aa, Bos taurus
YSVATQIVMGGVSGWCAGFL

SEQ ID NO: 13070 - protein, 20 aa, Bos taurus
VAFAVWVLVLYCQAPVLYFV

SEQ ID NO: 13071 - protein, 20 aa, Bos taurus
TFTLAYLVFAVCFVFTPTEF

SEQ ID NO: 13072 - protein, 20 aa, Bos taurus
PGQLRYVFIHNAIPFIGFGF

SEQ ID NO: 13073 - protein, 20 aa, Bos taurus
MIQALAMTVAEIPVFLYTTF

SEQ ID NO: 13074 - protein, 20 aa, Bos taurus
VFMVLLCLLCIVALVATELW

SEQ ID NO: 13075 - protein, 20 aa, Bos taurus
WWVQVGLLAVPLLAAYLHIP

SEQ ID NO: 13076 - protein, 20 aa, Bos taurus
AVATFLYAEIGLILIFCLPF

SEQ ID NO: 13077 - protein, 20 aa, Bos taurus
WAWLLVLSFVFGCNVLRILL

SEQ ID NO: 13078 - protein, 20 aa, Bos taurus
PWLVGLAGFHVLCLLLTCFS

SEQ ID NO: 13079 - protein, 20 aa, Bos taurus
VSNTFTALILSPLLLLFALW

SEQ ID NO: 13080 - protein, 20 aa, Bos taurus
KRCWDIALGPLKQIPMNLFI

SEQ ID NO: 13081 - protein, 20 aa, Bos taurus
GFVILTGAASFLMVTHLAIN

SEQ ID NO: 13082 - protein, 20 aa, Bos taurus
VFVFSLLDCCALIFLSVYFI

SEQ ID NO: 13083 - protein, 19 aa, Bos taurus
LSTHMTAGAMAGILEHSVM

SEQ ID NO: 13084 - protein, 23 aa, Bos taurus
WVVLPIVIITFFVGMIRHYVSIL

SEQ ID NO: 13085 - protein, 15 aa, Bos taurus
CRTSVSALSGATAGI

SEQ ID NO: 13086 - protein, 20 aa, Bos taurus
ALACVGGFVLGGAFGVFTAG

SEQ ID NO: 13087 - protein, 20 aa, Bos taurus
MLALLLTAALIFFAIWHIIA

SEQ ID NO: 13088 - protein, 20 aa, Bos taurus
LLYILLTGALQFGYCLLVGT

SEQ ID NO: 13089 - protein, 20 aa, Bos taurus
YSVATQLLIGGVTGWCTGFI

SEQ ID NO: 13090 - protein, 21 aa, Bos taurus
LHWTGERVVSVLLLGLIPAAY

SEQ ID NO: 13091 - protein, 20 aa, Bos taurus
AGFWWLIELLVLVGEYVETC

SEQ ID NO: 13092 - protein, 20 aa, Bos taurus
VLLGSGLTILSQPLMYVKVL

SEQ ID NO: 13093 - protein, 20 aa, Bos taurus
LVVGSLTSLLILVTLISAFV

SEQ ID NO: 13094 - protein, 20 aa, Bos taurus
CIVWSWTYLWTVWFFIVLFL

SEQ ID NO: 13095 - protein, 20 aa, Bos taurus
FELAFFTIGGCCMTGAAFGA

SEQ ID NO: 13096 - protein, 22 aa, Bos taurus
FQGRALLVTNTLGCGVLMAAGD

SEQ ID NO: 13097 - protein, 20 aa, Bos taurus
AVRWVVTLGLSFIYMIRVYL

SEQ ID NO: 13098 - protein, 20 aa, Bos taurus
AGVFVLALLWVSVLLLCALL

SEQ ID NO: 13099 - protein, 20 aa, Bos taurus
MDLIGFGYAALVTFGSILGY

SEQ ID NO: 13100 - protein, 20 aa, Bos taurus
IAQVLASELSLLAFILLVVM

SEQ ID NO: 13101 - protein, 20 aa, Bos taurus
GWASLAARGLGTLLFQGWAL

SEQ ID NO: 13102 - protein, 20 aa, Bos taurus
AFLSWFRNGLLASGIGVISF

SEQ ID NO: 13103 - protein, 20 aa, Bos taurus
AAIGGALAVAAVPAVLGAVG

SEQ ID NO: 13104 - protein, 20 aa, Bos taurus
VVAGVVVLILALVLAWLSTY

SEQ ID NO: 13105 - protein, 20 aa, Bos taurus
CGGAFTMGVIGGGVFQAIKG

SEQ ID NO: 13106 - protein, 20 aa, Bos taurus
VYALVVVSYFLITGGIIYDV

SEQ ID NO: 13107 - protein, 20 aa, Bos taurus
ILCSLLFAILLACLLAITYL

SEQ ID NO: 13108 - protein, 20 aa, Bos taurus
FAIASLEQTAYFIGIFAFLW

SEQ ID NO: 13109 - protein, 20 aa, Bos taurus
FYLRIILGANAIYCLVTLVV

SEQ ID NO: 13110 - protein, 20 aa, Bos taurus
MAATLGQVLALVLVAALWGG

SEQ ID NO: 13111 - protein, 20 aa, Bos taurus
LFWVTIIILSFGYYTWVIFW

SEQ ID NO: 13112 - protein, 20 aa, Bos taurus
LVLAVSQLWLAVAVVPFAVS

SEQ ID NO: 13113 - protein, 20 aa, Bos taurus
FGEIILAGFLASVIDIDHFL

SEQ ID NO: 13114 - protein, 24 aa, Bos taurus
PLYFIVNVIIPCLLFSFLTGLVFY

SEQ ID NO: 13115 - protein, 24 aa, Bos taurus
PLFYVINIIVPCVLISGLVLLAYF

SEQ ID NO: 13116 - protein, 25 aa, Bos taurus
LVGAPFASLVATGLCFFGVALFCGC

SEQ ID NO: 13117 - protein, 24 aa, Bos taurus
PLFYLVNVIAPCILITLLAIFVFY

SEQ ID NO: 13118 - protein, 24 aa, Bos taurus
PLFYVINILVPCVLISFMINLVFY

SEQ ID NO: 13119 - protein, 21 aa, Bos taurus
YFVIQTYLPCIMTVILSQVSF

SEQ ID NO: 13120 - protein, 21 aa, Bos taurus
FILQTYMPSTLITILSWVSFW

SEQ ID NO: 13121 - protein, 20 aa, Bos taurus
IGYFILQTYMPSILITILSW

SEQ ID NO: 13122 - protein, 24 aa, Bos taurus
PLFYVINIIAPCVLISSVAILIYF

SEQ ID NO: 13123 - protein, 22 aa, Bos taurus
GLWLMNWFSVLAGIIIFGLGLF

SEQ ID NO: 13124 - protein, 20 aa, Bos taurus
VWLSVLFIFRILLLGTAVES

SEQ ID NO: 13125 - protein, 21 aa, Bos taurus
FMIQTYIPCIMTVILSQVSFW

SEQ ID NO: 13126 - protein, 20 aa, Bos taurus
FMGGGLFCAWVGTILLVVAT

SEQ ID NO: 13127 - protein, 23 aa, Bos taurus
LGFVKVLQWVFAIFAFATCGSYS

SEQ ID NO: 13128 - protein, 22 aa, Bos taurus
YFTIQTYIPCTLIVVLSWVSFW

SEQ ID NO: 13129 - protein, 20 aa, Bos taurus
LLFGFNFIFWLAGIAVLSVG

SEQ ID NO: 13130 - protein, 20 aa, Bos taurus
VVVGLLVMGNIIILLSGLAL

SEQ ID NO: 13131 - protein, 20 aa, Bos taurus
IFGNVIIGMCSIALMAECIF

SEQ ID NO: 13132 - protein, 20 aa, Bos taurus
VIGKVWLTVLFIFRILVLGA

SEQ ID NO: 13133 - protein, 23 aa, Bos taurus
GLWLLSWLLVLVGGLTLLCSGHL

SEQ ID NO: 13134 - protein, 24 aa, Bos taurus
LYYGLNLLIPCVLISALALLVFLL

SEQ ID NO: 13135 - protein, 21 aa, Bos taurus
YLIQMYIPSLLIVILSWISFW

SEQ ID NO: 13136 - protein, 24 aa, Bos taurus
PLFYTINLIIPCLLISFLTVLVFY

SEQ ID NO: 13137 - protein, 21 aa, Bos taurus
FVIQTYLPCIMTVILSQVSFW

SEQ ID NO: 13138 - protein, 20 aa, Bos taurus
IFFFLLQTYFPATLMVMLSW

SEQ ID NO: 13139 - protein, 20 aa, Bos taurus
WCFGFLVLGYLLYLVFGAVV

SEQ ID NO: 13140 - protein, 20 aa, Bos taurus
GWVPVLFITFVVVWSYYAYV

SEQ ID NO: 13141 - protein, 20 aa, Bos taurus
IIALGVIAICSAMAMIDSVL

SEQ ID NO: 13142 - protein, 20 aa, Bos taurus
NISFAGCGFLGVYHIGVASC

SEQ ID NO: 13143 - protein, 16 aa, Bos taurus
AQKAALVLLSACLVAL

SEQ ID NO: 13144 - protein, 20 aa, Bos taurus
LLASVTLLGVLLQAYFSLQV

SEQ ID NO: 13145 - protein, 20 aa, Bos taurus
MLVLLAFIIVFHITSAALLL

SEQ ID NO: 13146 - protein, 22 aa, Bos taurus
MLIGEIFELMQFLFVVAFTTFL

SEQ ID NO: 13147 - protein, 20 aa, Bos taurus
LLFVFNFVFWLAGGVILGVA

SEQ ID NO: 13148 - protein, 20 aa, Bos taurus
LMKLLEISGHGIPWLLGTLY

SEQ ID NO: 13149 - protein, 20 aa, Bos taurus
GTSLAVLGWLCTIVCCALPM

SEQ ID NO: 13150 - protein, 28 aa, Bos taurus
LPAFLLCSALLVIKMYVVAVITGQVRLR

SEQ ID NO: 13151 - protein, 21 aa, Bos taurus
YMMGVYAPTLLIVVLSWLSFW

SEQ ID NO: 13152 - protein, 20 aa, Bos taurus
MGLIVFVWLYNFFLIPKIVL

SEQ ID NO: 13153 - protein, 20 aa, Bos taurus
MNLFKSNQLFFLLHLAHIIA

SEQ ID NO: 13154 - protein, 20 aa, Bos taurus
WWDVFTDYLSVAMLMIGVFG

SEQ ID NO: 13155 - protein, 20 aa, Bos taurus
YVPVSAAAIFLVGATTLFFA

SEQ ID NO: 13156 - protein, 22 aa, Bos taurus
VWLSVIFIFRIMVLVVAAESVW

SEQ ID NO: 13157 - protein, 21 aa, Bos taurus
YFVIQTYLPCIMTVILSQVSF

SEQ ID NO: 13158 - protein, 21 aa, Bos taurus
YFVIQTYLPCIMTVILSQVSF

SEQ ID NO: 13159 - protein, 22 aa, Bos taurus
ASFFAVMGASAAMVFSALGAAY

SEQ ID NO: 13160 - protein, 20 aa, Bos taurus
VQMLITTVGAFAAFSLMTIA

SEQ ID NO: 13161 - protein, 20 aa, Bos taurus
GGIPYASLIATILLYAGVAL

SEQ ID NO: 13162 - protein, 20 aa, Bos taurus
ILGLVLCLVGWVGLILACGL

SEQ ID NO: 13163 - protein, 20 aa, Bos taurus
VFLMSLLHLAAVYSLVLIPK

SEQ ID NO: 13164 - protein, 20 aa, Bos taurus
VSGPMVTVALSVVFLALLKW

SEQ ID NO: 13165 - protein, 20 aa, Bos taurus
NYSGTIALALLVSLVGGLLY

SEQ ID NO: 13166 - protein, 20 aa, Bos taurus
LEWFLGFYFLSHIPITLLMD

SEQ ID NO: 13167 - protein, 20 aa, Bos taurus
FAAAGIMVGSIYWTAVTYGA

SEQ ID NO: 13168 - protein, 20 aa, Bos taurus
GVVFVVLVIVLTSSIVAIAY

SEQ ID NO: 13169 - protein, 20 aa, Bos taurus
GIFYLTLFLILGTCTLFFAF

SEQ ID NO: 13170 - protein, 20 aa, Bos taurus
VVSNLLYYQTNYLVVAAMMI

SEQ ID NO: 13171 - protein, 20 aa, Bos taurus
FLCHLIFCYVFIVSGLIINT

SEQ ID NO: 13172 - protein, 23 aa, Bos taurus
LYFILETYVPSTFLVVLSWVSFW

SEQ ID NO: 13173 - protein, 20 aa, Bos taurus
GWVRLALCLAGLVLSLYALH

SEQ ID NO: 13174 - protein, 20 aa, Bos taurus
GIALAVLGWLGAILSCALPM

SEQ ID NO: 13175 - protein, 20 aa, Bos taurus
LLGFILAFLGWIGSIVSTAL

SEQ ID NO: 13176 - protein, 20 aa, Bos taurus
ILLGVWYLILNAVVLLILLS

SEQ ID NO: 13177 - protein, 20 aa, Bos taurus
LFLIIPCIGLSFLTVLVFYL

SEQ ID NO: 13178 - protein, 20 aa, Bos taurus
WRNIILMSLLHLGALYGITL

SEQ ID NO: 13179 - protein, 20 aa, Bos taurus
FLLYVLLLVFCACAVGLIAV

SEQ ID NO: 13180 - protein, 20 aa, Bos taurus
YSGAFVCLEIVFGGLVWILV

SEQ ID NO: 13181 - protein, 20 aa, Bos taurus
VASWVFSIAVFGPIVNEGYV

SEQ ID NO: 13182 - protein, 19 aa, Bos taurus
GKIWLTVLFIFRIMILVVA

SEQ ID NO: 13183 - protein, 20 aa, Bos taurus
LLLPALLGLRLVLLAAGGTG

SEQ ID NO: 13184 - protein, 20 aa, Bos taurus
MSLYFNTYFFPLWWVSSIMM

SEQ ID NO: 13185 - protein, 19 aa, Bos taurus
VGKIWLTVLFIFRILILGL

SEQ ID NO: 13186 - protein, 20 aa, Bos taurus
SLGALMLLQLVLGLLVWALI

SEQ ID NO: 13187 - protein, 18 aa, Bos taurus
LGMAYVSATTGAVATALG

SEQ ID NO: 13188 - protein, 20 aa, Bos taurus
VVVRAVCLVFALIVFSCIFG

SEQ ID NO: 13189 - protein, 20 aa, Bos taurus
MIGVFSHGFLAGCAVWNIVV

SEQ ID NO: 13190 - protein, 20 aa, Bos taurus
MVILSLYLAAFTLRLLLAGL

SEQ ID NO: 13191 - protein, 20 aa, Bos taurus
LVVFPLQMIYLVVKAAVGLV

SEQ ID NO: 13192 - protein, 18 aa, Bos taurus
VALLCILVGIVLALVAVV

SEQ ID NO: 13193 - protein, 16 aa, Bos taurus
GALWKFLLSGAMAGAV

SEQ ID NO: 13194 - protein, 20 aa, Bos taurus
ACVLTTAAVQLELLSPFQLY

SEQ ID NO: 13195 - protein, 20 aa, Bos taurus
QVVGFLLSILGLAGCIVATE

SEQ ID NO: 13196 - protein, 20 aa, Bos taurus
VIGKVWLTVLFIFRMLVLGT

SEQ ID NO: 13197 - protein, 21 aa, Bos taurus
IVLLAIVTLISVVQNGFFAHK

SEQ ID NO: 13198 - protein, 20 aa, Bos taurus
LYYLWMLNSVTLAVNLVGCL

SEQ ID NO: 13199 - protein, 20 aa, Bos taurus
FIFGFNVIFWFLGIAFLGIG

SEQ ID NO: 13200 - protein, 20 aa, Bos taurus
IGVLWAIFTICFAIINVVVF

SEQ ID NO: 13201 - protein, 20 aa, Bos taurus
LVGLVCIFLALCLDLGAVLS

SEQ ID NO: 13202 - protein, 20 aa, Bos taurus
LVIYSTVFWLIGGLVLSVGI

SEQ ID NO: 13203 - protein, 15 aa, Bos taurus
VFVFLGLILYCVATS

SEQ ID NO: 13204 - protein, 20 aa, Bos taurus
LLYALNLLFWLMSISVLAVS

SEQ ID NO: 13205 - protein, 20 aa, Bos taurus
VWLTVLVVFRIVLTAVGGES

SEQ ID NO: 13206 - protein, 22 aa, Bos taurus
IWLTVLIVFRIVLTAVGGESIY

SEQ ID NO: 13207 - protein, 20 aa, Bos taurus
VGLSLIPLSLVCIVANALLL

SEQ ID NO: 13208 - protein, 22 aa, Bos taurus
LVAVEIFGFFLTAVGLLMLGVT

SEQ ID NO: 13209 - protein, 20 aa, Bos taurus
LLTSSLGLVSLLVAVSTNFW

SEQ ID NO: 13210 - protein, 20 aa, Bos taurus
FGIFFILFGMLLYFDSVLLA

SEQ ID NO: 13211 - protein, 20 aa, Bos taurus
LIYVHLVIWLLLVAKMSVGH

SEQ ID NO: 13212 - protein, 20 aa, Bos taurus
ILFFLNGWYYATYFLLELFI

SEQ ID NO: 13213 - protein, 20 aa, Bos taurus
TFLYLKFLVVWALVLLADFV

SEQ ID NO: 13214 - protein, 20 aa, Bos taurus
IGMGLTGFGVFFLFFGMILF

SEQ ID NO: 13215 - protein, 20 aa, Bos taurus
VIVLRALAFLACAFLLTTAL

SEQ ID NO: 13216 - protein, 20 aa, Bos taurus
LLGFSMALLGWVGLVACTAI

SEQ ID NO: 13217 - protein, 20 aa, Bos taurus
VATCLQVVGFVTSFVGWIGI

SEQ ID NO: 13218 - protein, 20 aa, Bos taurus
LVALSFSGAIGLTFLMLGCA

SEQ ID NO: 13219 - protein, 20 aa, Bos taurus
LLFFFNMLFWVISMVMVAVG

SEQ ID NO: 13220 - protein, 20 aa, Bos taurus
VLNMLSLSLSTASLLSNYWF

SEQ ID NO: 13221 - protein, 20 aa, Bos taurus
LLFTFNCCFWLAGLAVMAVG

SEQ ID NO: 13222 - protein, 20 aa, Bos taurus
LVPLHWLGFGYAALVASGGI

SEQ ID NO: 13223 - protein, 19 aa, Bos taurus
GRIWLSVVFVFRVLVYVVA

SEQ ID NO: 13224 - protein, 20 aa, Bos taurus
VLFFFNLIFWFCGCCILGLG

SEQ ID NO: 13225 - protein, 20 aa, Bos taurus
FLFGFNIVFWVLGALFLAIG

SEQ ID NO: 13226 - protein, 20 aa, Bos taurus
WMCSTLALLLNFLACLASFC

SEQ ID NO: 13227 - protein, 20 aa, Bos taurus
AAGGVAAVVTWLLGEPALWL

SEQ ID NO: 13228 - protein, 20 aa, Bos taurus
MASTASEIIAFMVSISGWVL

SEQ ID NO: 13229 - protein, 20 aa, Bos taurus
TVTVVALSVALGLFFVFMGT

SEQ ID NO: 13230 - protein, 22 aa, Bos taurus
VWVTVLFVFRVMILVVAAQEVW

SEQ ID NO: 13231 - protein, 23 aa, Bos taurus
NEVFMAFASYTTIVLSKMNFMST

SEQ ID NO: 13232 - protein, 16 aa, Bos taurus
SLFLCYLLLYTCGCCE

SEQ ID NO: 13233 - protein, 20 aa, Bos taurus
LVGYVLGLLGLLGTVIAMLL

SEQ ID NO: 13234 - protein, 22 aa, Bos taurus
TMIGRILLTVVVIFRILIVAIV

SEQ ID NO: 13235 - protein, 20 aa, Bos taurus
INLIIPCVLITSLAILVFYL

SEQ ID NO: 13236 - skipped

SEQ ID NO: 13237 - protein, 29 aa, Bos taurus
LLLLLGIIVLHVAVLVLLFVSTIVSQWMV

SEQ ID NO: 13238 - protein, 20 aa, Bos taurus
LLQYVACFFAFFSAGFLVVA

SEQ ID NO: 13239 - protein, 20 aa, Bos taurus
LLCLSGTYYALYFLATLLLL

SEQ ID NO: 13240 - protein, 20 aa, Bos taurus
GVDCAILALSLLALPPGFLC

SEQ ID NO: 13241 - protein, 20 aa, Bos taurus
SVVVKALCAAVLFLYLLSFA

SEQ ID NO: 13242 - protein, 20 aa, Bos taurus
YSLVLSLQFLLLSYDLFVNS

SEQ ID NO: 13243 - protein, 22 aa, Bos taurus
SGRCTLIFICGMQLVCVLERQI

SEQ ID NO: 13244 - protein, 20 aa, Bos taurus
LGAIQILIGLTHIFTAINPS

SEQ ID NO: 13245 - protein, 20 aa, Bos taurus
VVATAVLVALVSLVLNNAAA

SEQ ID NO: 13246 - protein, 20 aa, Bos taurus
VLSFLCGIASVAGLFAGTLL

SEQ ID NO: 13247 - protein, 20 aa, Bos taurus
LLFIFNFFFWVGGAAVMAVG

SEQ ID NO: 13248 - protein, 20 aa, Bos taurus
VWQFVSAVLFSGIAIMALAF

SEQ ID NO: 13249 - protein, 20 aa, Bos taurus
LPGLLIVAEIVLGLLVWTLI

SEQ ID NO: 13250 - protein, 20 aa, Bos taurus
LLILSQIVLMQTVYYGSLGL

SEQ ID NO: 13251 - protein, 16 aa, Bos taurus
SFIALGVIGLLALYLV

SEQ ID NO: 13252 - protein, 19 aa, Bos taurus
PVASFFHLFFRVSAIIVYL

SEQ ID NO: 13253 - protein, 20 aa, Bos taurus
VMIFNGLVALGTVGSQELFT

SEQ ID NO: 13254 - protein, 20 aa, Bos taurus
LYYQTNYLICFGLGLALAGY

SEQ ID NO: 13255 - protein, 20 aa, Bos taurus
FNLFFFVLGSLIFCFGIWIL

SEQ ID NO: 13256 - protein, 17 aa, Bos taurus
WPANVLLYAGFFSGGDA

SEQ ID NO: 13257 - protein, 20 aa, Bos taurus
VQVLTAGSLMGLGDVISQQL

SEQ ID NO: 13258 - protein, 23 aa, Bos taurus
CSMFIFNFVFWLCGAIILSVAIS

SEQ ID NO: 13259 - protein, 20 aa, Bos taurus
LYPVLTKAATSGILSALGNF

SEQ ID NO: 13260 - protein, 20 aa, Bos taurus
ITRIFAGVFSLIVFSSLLTD

SEQ ID NO: 13261 - protein, 20 aa, Bos taurus
VTALGILSLILNIMCAALNL

SEQ ID NO: 13262 - protein, 20 aa, Bos taurus
VVFMISVSAMAIAFLTLGYF

SEQ ID NO: 13263 - protein, 20 aa, Bos taurus
MTGIFCIFMWYLLLILYMGQ

SEQ ID NO: 13264 - protein, 20 aa, Bos taurus
LCALNVVYMLVGLLLIGVAA

SEQ ID NO: 13265 - protein, 20 aa, Bos taurus
MFFSSWTLVFLAVGIIIEEW

SEQ ID NO: 13266 - protein, 20 aa, Bos taurus
VLLIYTFIFWITGVILLAVG

SEQ ID NO: 13267 - protein, 20 aa, Bos taurus
NGSTYVGLNAALCGLIANSL

SEQ ID NO: 13268 - protein, 20 aa, Bos taurus
LISLSFGGAIGLMFLMLGCA

SEQ ID NO: 13269 - protein, 20 aa, Bos taurus
VGLALILVGHVNLLLGAVLH

SEQ ID NO: 13270 - protein, 20 aa, Bos taurus
SSALFFGNAFIVSAIPIWLY

SEQ ID NO: 13271 - protein, 20 aa, Bos taurus
WTTVFLAEYTGPLLIYLLFY

SEQ ID NO: 13272 - protein, 20 aa, Bos taurus
VVAGILFFTGWWIMIDAAVV

SEQ ID NO: 13273 - protein, 20 aa, Bos taurus
VLVFLNLIFWGAAGILCYVG

SEQ ID NO: 13274 - protein, 20 aa, Bos taurus
ILFNMLIFLCGAALLAVGIW

SEQ ID NO: 13275 - protein, 20 aa, Bos taurus
GFSLLVLLLLGVTLNAIPLI

SEQ ID NO: 13276 - protein, 20 aa, Bos taurus
LSSLLIPLALWSIIVNILLY

SEQ ID NO: 13277 - protein, 20 aa, Bos taurus
YTLVSLLLIGIAAWGIGFGL

SEQ ID NO: 13278 - protein, 20 aa, Bos taurus
VFVVIWWYMDEGLLAPQWLF

SEQ ID NO: 13279 - protein, 21 aa, Bos taurus
LLFIFEFVFGGLVWILVSSSH

SEQ ID NO: 13280 - protein, 20 aa, Bos taurus
LVLVVLGHVSFIAAALLHGT

SEQ ID NO: 13281 - protein, 20 aa, Bos taurus
FVFNFFIFLGGACLLGIGIW

SEQ ID NO: 13282 - protein, 20 aa, Bos taurus
IYRLWLFYCATLGVNLVACL

SEQ ID NO: 13283 - protein, 20 aa, Bos taurus
LLLVVSALHILILILLFVAT

SEQ ID NO: 13284 - protein, 20 aa, Bos taurus
TYQRHYRNVFHAFITIGKVD

SEQ ID NO: 13285 - protein, 20 aa, Bos taurus
IFFLFVIGAILLCVGVLLSI

SEQ ID NO: 13286 - protein, 20 aa, Bos taurus
LYAIHGYFCEVMFTAAWEFV

SEQ ID NO: 13287 - protein, 20 aa, Bos taurus
TIILGTWYMVVNLLMAILLT

SEQ ID NO: 13288 - protein, 20 aa, Bos taurus
GFLLFAEIILCLVILICFST

SEQ ID NO: 13289 - protein, 20 aa, Bos taurus
WVMQIVLGLLSGVLGGFLYI

SEQ ID NO: 13290 - protein, 20 aa, Bos taurus
LCFAVAVGLVAGCGAGGVAL

SEQ ID NO: 13291 - protein, 20 aa, Bos taurus
FWGVFNCLCAGAFGALAAAS

SEQ ID NO: 13292 - protein, 20 aa, Bos taurus
VLSGAWGMQMWVTFISGFVL

SEQ ID NO: 13293 - protein, 20 aa, Bos taurus
NIHSGFWILASIVVTYYVDF

SEQ ID NO: 13294 - protein, 20 aa, Bos taurus
AFFGLLLGHILAMEVLAWLM

SEQ ID NO: 13295 - protein, 20 aa, Bos taurus
PAGLAVFRFLFGLMMVLDIP

SEQ ID NO: 13296 - protein, 20 aa, Bos taurus
LVLLYSGVFVAFWACLLVVG

SEQ ID NO: 13297 - protein, 20 aa, Bos taurus
LVVGVFVVYVVHTCWVMYGI

SEQ ID NO: 13298 - protein, 20 aa, Bos taurus
LLRDWDLWGPLILCVTLALM

SEQ ID NO: 13299 - protein, 20 aa, Bos taurus
PKLFLIFLLGLTLFFCGDLL

SEQ ID NO: 13300 - protein, 20 aa, Bos taurus
LLASSFVFLNLLGQLTGCIL

SEQ ID NO: 13301 - protein, 20 aa, Bos taurus
SGFLMGLSVIGSVFNITGIA

SEQ ID NO: 13302 - protein, 20 aa, Bos taurus
MMLYIVFILSVIFVMGFVGF

SEQ ID NO: 13303 - protein, 20 aa, Bos taurus
VPAVGFTLLPSLGGFLGAQY

SEQ ID NO: 13304 - protein, 20 aa, Bos taurus
PTGGALLLLVLAALLGWSWL

SEQ ID NO: 13305 - protein, 22 aa, Bos taurus
WLTRIVLLRALAFVYFVAFLVA

SEQ ID NO: 13306 - protein, 20 aa, Bos taurus
IIPCFVFVEILLGELARAFF

SEQ ID NO: 13307 - protein, 20 aa, Bos taurus
LLLVAALAGLGLGLSLIFIA

SEQ ID NO: 13308 - protein, 20 aa, Bos taurus
IATTALAIYHVIMSVLLFIE

SEQ ID NO: 13309 - protein, 20 aa, Bos taurus
YLLALTIIVSIVHSVFEFLA

SEQ ID NO: 13310 - protein, 20 aa, Bos taurus
LGLGSYTPVGLIQNLLEFMH

SEQ ID NO: 13311 - protein, 20 aa, Bos taurus
LYIPTMAFITYVLLAGMALG

SEQ ID NO: 13312 - protein, 20 aa, Bos taurus
AFLVLLSIWLCVSTIGFGFV

SEQ ID NO: 13313 - protein, 20 aa, Bos taurus
FLVLFLLYLALVLLGFVMIC

SEQ ID NO: 13314 - protein, 20 aa, Bos taurus
TDLAGPMVFCLAFGATLLLA

SEQ ID NO: 13315 - protein, 17 aa, Bos taurus
ITGCMMTFYRTTPAVLF

SEQ ID NO: 13316 - protein, 20 aa, Bos taurus
VGAALILFPCLLYGAYAFLP

SEQ ID NO: 13317 - protein, 22 aa, Bos taurus
MIITGFMLQFYRTMPAVIFWQW

SEQ ID NO: 13318 - protein, 20 aa, Bos taurus
ILIVIFPVLAILLFWGQFGI

SEQ ID NO: 13319 - protein, 20 aa, Bos taurus
LTGPILFCMALGATLLLAGK

SEQ ID NO: 13320 - protein, 20 aa, Bos taurus
LSLGAKAALAAGTVFVSMIV

SEQ ID NO: 13321 - protein, 20 aa, Bos taurus
LVTVCCPLVAFLFCVLWSLL

SEQ ID NO: 13322 - protein, 20 aa, Bos taurus
VYVFLLFCSAYLYKQSFAIP

SEQ ID NO: 13323 - protein, 20 aa, Bos taurus
WNGGVFWFSLLLFYRVFIPV

SEQ ID NO: 13324 - protein, 20 aa, Bos taurus
LVRSSLSGTLLVVVKLSALL

SEQ ID NO: 13325 - protein, 20 aa, Bos taurus
AALLPFTAPTLFLSMLPVKS

SEQ ID NO: 13326 - protein, 20 aa, Bos taurus
MVGVTLANVLPVCLALLPPP

SEQ ID NO: 13327 - protein, 20 aa, Bos taurus
LESVVVLTLALLEILVALRH

SEQ ID NO: 13328 - protein, 20 aa, Bos taurus
MIAFFFIIIYLGPMVLMMIV

SEQ ID NO: 13329 - protein, 22 aa, Bos taurus
VQRSLVLFSVGVVLALVLNLLQ

SEQ ID NO: 13330 - protein, 20 aa, Bos taurus
LLCVTVISLCSLLGASVVPF

SEQ ID NO: 13331 - protein, 20 aa, Bos taurus
LFMYNLVQFLGFSWIFVNMT

SEQ ID NO: 13332 - protein, 20 aa, Bos taurus
DWIILILTFYTAILVPYNVS

SEQ ID NO: 13333 - protein, 20 aa, Bos taurus
GISIFVILVWLGMNVFLFVW

SEQ ID NO: 13334 - protein, 20 aa, Bos taurus
AVTAEFLAMLIFVLLSLGST

SEQ ID NO: 13335 - protein, 29 aa, Bos taurus
FLKDFLAGGVAAAISKTAVAPIERVKLLL

SEQ ID NO: 13336 - protein, 23 aa, Bos taurus
FWRAICAEFFASLFYVFFGLGAS

SEQ ID NO: 13337 - protein, 21 aa, Bos taurus
PTMAVKIFSAGVAACVADIIT

SEQ ID NO: 13338 - protein, 20 aa, Bos taurus
VAFSQLLGLIVVAMTGAWLG

SEQ ID NO: 13339 - protein, 18 aa, Bos taurus
KFLFGGLAGMGATVFVQP

SEQ ID NO: 13340 - protein, 29 aa, Bos taurus
FAKDFLAGGIAAAISKTAVAPIERVKLLL

SEQ ID NO: 13341 - protein, 24 aa, Bos taurus
FWRAVVAEFLAMILFIFISIGSAL

SEQ ID NO: 13342 - protein, 20 aa, Bos taurus
AVLAEFLATLLFVFFGLGSA

SEQ ID NO: 13343 - protein, 20 aa, Bos taurus
YYNWLFCITLPVMYNWTMII

SEQ ID NO: 13344 - protein, 21 aa, Bos taurus
PARGIAIVSVLVILISIVIFC

SEQ ID NO: 13345 - protein, 20 aa, Bos taurus
VYASFALCMFVAAAGAYIHV

SEQ ID NO: 13346 - protein, 16 aa, Bos taurus
WTYLVVLLISIPIGFL

SEQ ID NO: 13347 - protein, 18 aa, Bos taurus
ILWLFFVVLAWNWNCWLI

SEQ ID NO: 13348 - protein, 20 aa, Bos taurus
WVFVLLDVLCVLVAALPCAI

SEQ ID NO: 13349 - protein, 18 aa, Bos taurus
LVIYNVVMTAGWLVIAVG

SEQ ID NO: 13350 - protein, 20 aa, Bos taurus
VLLICLDLFCLFMAGLPFII

SEQ ID NO: 13351 - protein, 20 aa, Bos taurus
ITLPLALLFLIIRYFFELYV

SEQ ID NO: 13352 - protein, 20 aa, Bos taurus
SNLIWIVIMMVLTQFVAFYL

SEQ ID NO: 13353 - protein, 21 aa, Bos taurus
VLRELATYLLFLIVLCILTYG

SEQ ID NO: 13354 - protein, 20 aa, Bos taurus
IAQLIVTVFLGLVIGAIFYD

SEQ ID NO: 13355 - protein, 20 aa, Bos taurus
VFPHPQDTLMAVPLALALVV

SEQ ID NO: 13356 - protein, 29 aa, Bos taurus
FAKDFLAGGVAAAISKTAVAPIERVKLLL

SEQ ID NO: 13357 - protein, 20 aa, Bos taurus
GSPLISLLFWILICFSIAAL

SEQ ID NO: 13358 - protein, 20 aa, Bos taurus
FWSSISFNLAVLMNLLVAFF

SEQ ID NO: 13359 - protein, 20 aa, Bos taurus
LPWALAASMLAGSLLKELSP

SEQ ID NO: 13360 - protein, 20 aa, Bos taurus
VGWFYLSVLALCSLGSMCIL

SEQ ID NO: 13361 - protein, 20 aa, Bos taurus
FLLDALAYLECALGVVCYVL

SEQ ID NO: 13362 - protein, 20 aa, Bos taurus
ALGGPGPGLCCWVSVFSCLS

SEQ ID NO: 13363 - protein, 20 aa, Bos taurus
FIIHGASYFTFLLLLNLYSL

SEQ ID NO: 13364 - skipped

SEQ ID NO: 13365 - protein, 20 aa, Bos taurus
FITPVILGLPLVTLIVLFPS

SEQ ID NO: 13366 - protein, 22 aa, Bos taurus
FFILCGLGGIISCGTTHTALVP

SEQ ID NO: 13367 - protein, 20 aa, Bos taurus
ALLYHALVFLIVLGCLILAV

SEQ ID NO: 13368 - protein, 20 aa, Bos taurus
MVTCFIVGLLFPVFSVCYLI

SEQ ID NO: 13369 - protein, 19 aa, Bos taurus
YRWLFLIALPVLYNWCLLV

SEQ ID NO: 13370 - protein, 20 aa, Bos taurus
AECLGTLILVMFGCGSVAQV

SEQ ID NO: 13371 - protein, 20 aa, Bos taurus
LCTACAVCCVFMAGEVVGGY

SEQ ID NO: 13372 - protein, 20 aa, Bos taurus
LFIYYLIQFCGHSWIFTNMT

SEQ ID NO: 13373 - protein, 20 aa, Bos taurus
LLHLFAGGCGGTVGAIFTCP

SEQ ID NO: 13374 - skipped

SEQ ID NO: 13375 - protein, 29 aa, Bos taurus
FGKDLLAGGVAAAVSKTTVAPIERVKLLL

SEQ ID NO: 13376 - protein, 21 aa, Bos taurus
AAKILAIVSILFIVLSTIALS

SEQ ID NO: 13377 - protein, 20 aa, Bos taurus
ALVFYYVTGFFIAVSVIANV

SEQ ID NO: 13378 - protein, 20 aa, Bos taurus
VSGAAAHLVALGFTIFVAVL

SEQ ID NO: 13379 - protein, 15 aa, Bos taurus
RYWFAATVAVPLVGK

SEQ ID NO: 13380 - protein, 20 aa, Bos taurus
LWGSISFNLAVFINLAVALF

SEQ ID NO: 13381 - protein, 20 aa, Bos taurus
ILAGGSAGLVEICLMHPLDV

SEQ ID NO: 13382 - protein, 20 aa, Bos taurus
LFFFLCLNLSFAFVELLYGI

SEQ ID NO: 13383 - protein, 17 aa, Bos taurus
LLAGGVAGAVSRTSTAP

SEQ ID NO: 13384 - protein, 20 aa, Bos taurus
LWVSWFSIIVTLALAVAAFT

SEQ ID NO: 13385 - protein, 21 aa, Bos taurus
PTTSVKFLAAGTAACFADLLT

SEQ ID NO: 13386 - protein, 17 aa, Bos taurus
ILAGGLAGGIEICITFP

SEQ ID NO: 13387 - protein, 19 aa, Bos taurus
YWLRSFLAGGIAGCCAKTT

SEQ ID NO: 13388 - protein, 20 aa, Bos taurus
FKLYLTIILILISFTCRFLL

SEQ ID NO: 13389 - protein, 20 aa, Bos taurus
LINGGIAGLIGVTCVFPIDL

SEQ ID NO: 13390 - protein, 20 aa, Bos taurus
ALDFLAGCAGGVAGVLVGHP

SEQ ID NO: 13391 - protein, 20 aa, Bos taurus
IFGVISIIFVAVSIVNMALM

SEQ ID NO: 13392 - protein, 17 aa, Bos taurus
LVAGGGAGAVSRTCTAP

SEQ ID NO: 13393 - protein, 20 aa, Bos taurus
ILLFGAINLTCTGFLLMWCS

SEQ ID NO: 13394 - protein, 20 aa, Bos taurus
MVASGAGAVVTSLFMTPLDV

SEQ ID NO: 13395 - protein, 20 aa, Bos taurus
LYGSLATLLICLCSLLGLLL

SEQ ID NO: 13396 - protein, 21 aa, Bos taurus
PTATVKFLGAGTAACIADLIT

SEQ ID NO: 13397 - protein, 20 aa, Bos taurus
LSFLPSALVIWTAAAFIFSY

SEQ ID NO: 13398 - protein, 25 aa, Bos taurus
FLCGSISGTCSTLLFQPLDLLKTRL

SEQ ID NO: 13399 - protein, 20 aa, Bos taurus
LTIAAVLYLLFMIGELVGGY

SEQ ID NO: 13400 - protein, 20 aa, Bos taurus
MFLPLVFTVFTSAGLWIVYF

SEQ ID NO: 13401 - protein, 22 aa, Bos taurus
GLYLNLVLGNVNVTLLSNQAKF

SEQ ID NO: 13402 - protein, 20 aa, Bos taurus
GFTASLVAGGVAGVSVDLIL

SEQ ID NO: 13403 - protein, 20 aa, Bos taurus
PMCLAFWAIAGIWTVFSLAV

SEQ ID NO: 13404 - protein, 20 aa, Bos taurus
GWLLVPLHQLVSWGAAGAMV

SEQ ID NO: 13405 - protein, 20 aa, Bos taurus
MFASCTGAILTSLMVTPFDV

SEQ ID NO: 13406 - protein, 20 aa, Bos taurus
MALALCLQALCSLGGWLSLY

SEQ ID NO: 13407 - protein, 20 aa, Bos taurus
AVAGSVSGLVTRVLISPLDV

SEQ ID NO: 13408 - protein, 23 aa, Bos taurus
LLLIPAALASFILAFGTGVEFVR

SEQ ID NO: 13409 - protein, 20 aa, Bos taurus
FVAGWIGGAASVIVGHPLDT

SEQ ID NO: 13410 - protein, 20 aa, Bos taurus
AVDLVLGASACCLACVFTNP

SEQ ID NO: 13411 - protein, 20 aa, Bos taurus
MTLFHFGNCFALAYFPYFIT

SEQ ID NO: 13412 - protein, 20 aa, Bos taurus
HALPGSFFLIVGLWWSLKYP

SEQ ID NO: 13413 - protein, 20 aa, Bos taurus
ILQSASFLTANGALFMAFFC

SEQ ID NO: 13414 - protein, 20 aa, Bos taurus
WLLMSSPLPQTIILGFYVYF

SEQ ID NO: 13415 - protein, 25 aa, Bos taurus
VFIPSVYTGVFLVSLPLNIMAVVVF

SEQ ID NO: 13416 - protein, 20 aa, Bos taurus
VWFIFLVALFFNLLVILTTF

SEQ ID NO: 13417 - protein, 20 aa, Bos taurus
IIGTTLFGVSLLLGITAAYI

SEQ ID NO: 13418 - protein, 20 aa, Bos taurus
WVGIVISLVCLAICIFTFCF

SEQ ID NO: 13419 - protein, 20 aa, Bos taurus
WVGILLSLVCLLICIFTFCF

SEQ ID NO: 13420 - protein, 20 aa, Bos taurus
LLSVITWVGIVISLVCLAIC

SEQ ID NO: 13421 - protein, 18 aa, Bos taurus
WPLTGALSALLMTSGLTM

SEQ ID NO: 13422 - protein, 24 aa, Bos taurus
FSMLAAYMFLLIMLGFPINFLTLY

SEQ ID NO: 13423 - protein, 23 aa, Bos taurus
LLGVILGGLILFGVLGNILVILS

SEQ ID NO: 13424 - protein, 22 aa, Bos taurus
AMLLTLLIFVIVFGNVLVCMAV

SEQ ID NO: 13425 - protein, 21 aa, Bos taurus
YINTVISCTIFIVGMVGNATL

SEQ ID NO: 13426 - protein, 29 aa, Bos taurus
YIFIMIPTLYSIIFVVGIFGNSLVVIVIY

SEQ ID NO: 13427 - protein, 24 aa, Bos taurus
IFLPTVYSIIFLTGIVGNGLVILV

SEQ ID NO: 13428 - protein, 24 aa, Bos taurus
YINTVVSCLVFVLGIIGNSTLLRI

SEQ ID NO: 13429 - protein, 22 aa, Bos taurus
LVVVLSTISLVTVGLNLLVLYA

SEQ ID NO: 13430 - protein, 19 aa, Bos taurus
RFLGDLSHLLAIILLLLKI

SEQ ID NO: 13431 - protein, 22 aa, Bos taurus
GIALTLFAVLGIFLTAFVLGVF

SEQ ID NO: 13432 - protein, 22 aa, Bos taurus
VVFIVLVAGSLSLVTIIGNILV

SEQ ID NO: 13433 - protein, 25 aa, Bos taurus
VSIPDGLFLSLGLVSLVENVLVVAA

SEQ ID NO: 13434 - protein, 24 aa, Bos taurus
AELALLSTVFVAVALSNGLVLGAL

SEQ ID NO: 13435 - protein, 24 aa, Bos taurus
TAIIIMALYSIVCVVGLFGNFLVM

SEQ ID NO: 13436 - protein, 19 aa, Bos taurus
IVLWRQPLITLQYFSLETL

SEQ ID NO: 13437 - protein, 27 aa, Bos taurus
YKFLRIVVWFVSLLALLGNVFVLVILL

SEQ ID NO: 13438 - protein, 24 aa, Bos taurus
LVMGLGITVCIFIMLANLLVMVAI

SEQ ID NO: 13439 - protein, 23 aa, Bos taurus
GMGILMSLIVLAIVFGNVLVITA

SEQ ID NO: 13440 - protein, 20 aa, Bos taurus
WWAFLASSMVTFFGGLFIIL

SEQ ID NO: 13441 - protein, 25 aa, Bos taurus
LTLVCLAGLLMLFTVFGNVLVIIAV

SEQ ID NO: 13442 - protein, 27 aa, Bos taurus
RLLPPLYSLVFIFGFVGNMLVVLILIN

SEQ ID NO: 13443 - protein, 29 aa, Bos taurus
KLTTVFLPVVYTIVFVVGLPSNGMALWVF

SEQ ID NO: 13444 - protein, 20 aa, Bos taurus
WFLLDNYVPTLVCSILYLLI

SEQ ID NO: 13445 - protein, 20 aa, Bos taurus
LMVIMTLFVLGSIAIFLEAA

SEQ ID NO: 13446 - protein, 21 aa, Bos taurus
LISVVFILICCFIILENIFVL

SEQ ID NO: 13447 - protein, 20 aa, Bos taurus
VLYSLLFVLGLLGNGIVAVV

SEQ ID NO: 13448 - protein, 23 aa, Bos taurus
WSALLTAVVIILTIAGNILVIMA

SEQ ID NO: 13449 - protein, 25 aa, Bos taurus
ILTACFLSLLILSTLLGNTLVCAAV

SEQ ID NO: 13450 - protein, 20 aa, Bos taurus
YIGCSLSVLCLAITLVTFAV

SEQ ID NO: 13451 - protein, 20 aa, Bos taurus
IVALGTVFVVILYSLVFAFG

SEQ ID NO: 13452 - protein, 19 aa, Bos taurus
IGHVLSIASLLISLGIFFY

SEQ ID NO: 13453 - protein, 20 aa, Bos taurus
IVSIINQVIGWIYFVAWSVS

SEQ ID NO: 13454 - protein, 20 aa, Bos taurus
LVAVYSVICLLGILGNGLVI

SEQ ID NO: 13455 - protein, 23 aa, Bos taurus
LALWTAAYLALVLVAVMGNATVI

SEQ ID NO: 13456 - protein, 25 aa, Bos taurus
VILPEEIFFTVSIVGVLENLMVLLA

SEQ ID NO: 13457 - protein, 24 aa, Bos taurus
FSMTMMITGFVGNALAITLVSKSY

SEQ ID NO: 13458 - protein, 24 aa, Bos taurus
VFLPAFFTIAFIIGLAGNSTVVAI

SEQ ID NO: 13459 - protein, 20 aa, Bos taurus
VLIWFISILAITGNILVLVI

SEQ ID NO: 13460 - protein, 23 aa, Bos taurus
VVFIAFLTGVLALVTIIGNILVI

SEQ ID NO: 13461 - protein, 26 aa, Bos taurus
VALAGALLALAVLATVGGNLLVIVAI

SEQ ID NO: 13462 - protein, 20 aa, Bos taurus
VLAVGTVLLVEALSGLSLNI

SEQ ID NO: 13463 - protein, 22 aa, Bos taurus
YYLPAVYILVFIIGFLGNSVAI

SEQ ID NO: 13464 - protein, 24 aa, Bos taurus
FHLQAVFMGFVFFVGTPLNATVLV

SEQ ID NO: 13465 - protein, 24 aa, Bos taurus
ARVEVAVLCLILFLALSGNACVLL

SEQ ID NO: 13466 - protein, 21 aa, Bos taurus
PATSTLMFVAGVVGNGLALGI

SEQ ID NO: 13467 - protein, 17 aa, Bos taurus
SMFPFFDIAHYLVSVMA

SEQ ID NO: 13468 - protein, 20 aa, Bos taurus
LLALLLFAVGIVGSLAVMCI

SEQ ID NO: 13469 - protein, 20 aa, Bos taurus
VYTILLIQLLVTLGVVALFT

SEQ ID NO: 13470 - protein, 24 aa, Bos taurus
VYVALELALAALSVTGNVLVCAAV

SEQ ID NO: 13471 - protein, 20 aa, Bos taurus
MIYTVGYSVSLASLTVAVLI

SEQ ID NO: 13472 - protein, 25 aa, Bos taurus
ILMPLHYSIVFIIGLVGNLLALIVI

SEQ ID NO: 13473 - protein, 20 aa, Bos taurus
LAYGAVIILGVSGNLALIII

SEQ ID NO: 13474 - protein, 20 aa, Bos taurus
VSGVFVWAALVLTGHQIYLH

SEQ ID NO: 13475 - protein, 26 aa, Bos taurus
YAVVVIDALVFLLSLLGNSLVMLVIL

SEQ ID NO: 13476 - protein, 21 aa, Bos taurus
VLIWLINILAITGNVTVLFVL

SEQ ID NO: 13477 - protein, 22 aa, Bos taurus
LYTVGYSTSLVTLTTAMVILCR

SEQ ID NO: 13478 - protein, 27 aa, Bos taurus
ILVIITAVYSVVFVVGLVGNSLVMFVI

SEQ ID NO: 13479 - protein, 20 aa, Bos taurus
IVLLYSIVVVVGLVGNCLLV

SEQ ID NO: 13480 - protein, 25 aa, Bos taurus
KLIPAIYILVFAVGMPANAVTLWML

SEQ ID NO: 13481 - protein, 20 aa, Bos taurus
LASVIFLLLFAPFIVYYFIM

SEQ ID NO: 13482 - protein, 23 aa, Bos taurus
PVTIPAVMFIFGVVGNLVAIVVL

SEQ ID NO: 13483 - protein, 20 aa, Bos taurus
KVGLALSLACLLLCILTFLL

SEQ ID NO: 13484 - protein, 22 aa, Bos taurus
FGGPLGAAALMLLLPVTMFHLL

SEQ ID NO: 13485 - protein, 22 aa, Bos taurus
FAASFCLVGLASNLLALSVLMG

SEQ ID NO: 13486 - protein, 24 aa, Bos taurus
YHLTSAWMVFVVIASVFTNGLVLA

SEQ ID NO: 13487 - protein, 25 aa, Bos taurus
LFVSPEVFVTLGVISLLENILVIVA

SEQ ID NO: 13488 - protein, 28 aa, Bos taurus
QWTAGMGLLMAFIVLLIVVGNVLVLVAI

SEQ ID NO: 13489 - protein, 21 aa, Bos taurus
LFPIFYSIVFVLGVIANSYVL

SEQ ID NO: 13490 - protein, 20 aa, Bos taurus
FTVSAFILLLHVSFVANYPS

SEQ ID NO: 13491 - protein, 20 aa, Bos taurus
VPLFPVFDLSYFIVSILYLK

SEQ ID NO: 13492 - protein, 20 aa, Bos taurus
MGGVLFSTGLVGNLLALGLL

SEQ ID NO: 13493 - protein, 20 aa, Bos taurus
IVIVLLTFLIIAGNLTVIFV

SEQ ID NO: 13494 - protein, 20 aa, Bos taurus
LSTLLLCLSNLMFLPPVVLA

SEQ ID NO: 13495 - protein, 20 aa, Bos taurus
FVHSLVTILAVCIYGVAPVG

SEQ ID NO: 13496 - protein, 20 aa, Bos taurus
ALLGGLVRVLLWVASALLYF

SEQ ID NO: 13497 - protein, 20 aa, Bos taurus
FQEPASAVASFLNGLASLVM

SEQ ID NO: 13498 - protein, 20 aa, Bos taurus
LVYLVIFVVGILGNSVTIRV

SEQ ID NO: 13499 - protein, 20 aa, Bos taurus
LAIISFQALCMLLDFLSMLV

SEQ ID NO: 13500 - protein, 20 aa, Bos taurus
ILLLALSLLGILFVLAIGII

SEQ ID NO: 13501 - protein, 20 aa, Bos taurus
LFGSWLIRIGVWTIAVLALT

SEQ ID NO: 13502 - protein, 20 aa, Bos taurus
VLYLLVCAVGLGGNTLVIYV

SEQ ID NO: 13503 - protein, 20 aa, Bos taurus
LAPVVYVMVLVVGFPANCLS

SEQ ID NO: 13504 - protein, 22 aa, Bos taurus
AYIGIEVLIALVSVPGNVLVIW

SEQ ID NO: 13505 - protein, 19 aa, Bos taurus
VTVTFFLFLLSTIFNTSFL

SEQ ID NO: 13506 - protein, 23 aa, Bos taurus
VVLTFIYFVVCIIGLCGNTLVIY

SEQ ID NO: 13507 - protein, 22 aa, Bos taurus
GVVLSAMGVVGMAGNVYTLTVM

SEQ ID NO: 13508 - protein, 23 aa, Bos taurus
IAVEVFLALGLISLLENILVIGA

SEQ ID NO: 13509 - protein, 20 aa, Bos taurus
VLILAYCSIILLGVIGNSLV

SEQ ID NO: 13510 - protein, 21 aa, Bos taurus
VTLYAVIFLMSVGGNVLIIVV

SEQ ID NO: 13511 - protein, 20 aa, Bos taurus
ALPALVCIMCCLFGVVYCFF

SEQ ID NO: 13512 - protein, 20 aa, Bos taurus
WVLIAAYVAVFFVALVGNTL

SEQ ID NO: 13513 - protein, 20 aa, Bos taurus
LYTTVFMVGLLDNILVVFIL

SEQ ID NO: 13514 - protein, 22 aa, Bos taurus
YISVEILIGLCAIVGNVLVIWV

SEQ ID NO: 13515 - protein, 20 aa, Bos taurus
LYMVMSACFLGAGIFWVSIL

SEQ ID NO: 13516 - protein, 20 aa, Bos taurus
TLYALLFFSVYAQLWLVLLY

SEQ ID NO: 13517 - protein, 20 aa, Bos taurus
LYIFVIGVGLPTNCLALWAA

SEQ ID NO: 13518 - protein, 19 aa, Bos taurus
LFFTVGFTGCAFGSAAIWQ

SEQ ID NO: 13519 - protein, 20 aa, Bos taurus
GIVVAVTGTVGNVLTLLALA

SEQ ID NO: 13520 - protein, 19 aa, Bos taurus
RLTGDLSHLAAIVILLLKI

SEQ ID NO: 13521 - protein, 20 aa, Bos taurus
LLGTFFTWGLTAAGAALVFV

SEQ ID NO: 13522 - protein, 20 aa, Bos taurus
IILEAVAGAGVVTTFVLTII

SEQ ID NO: 13523 - protein, 20 aa, Bos taurus
FVAIVIITVFVCLGNLVIVI

SEQ ID NO: 13524 - protein, 20 aa, Bos taurus
VFLVLTLQLSVTLSTVAVFT

SEQ ID NO: 13525 - protein, 20 aa, Bos taurus
FVVFVAGILLNGMSGWVFFY

SEQ ID NO: 13526 - protein, 20 aa, Bos taurus
VFYSCIFIIGLFVNVTALWV

SEQ ID NO: 13527 - protein, 20 aa, Bos taurus
VGMGLLPFFLACAVYLLVRN

SEQ ID NO: 13528 - protein, 22 aa, Bos taurus
LVIIVLSVALAVGLPGNSFVVW

SEQ ID NO: 13529 - protein, 20 aa, Bos taurus
YLVFLIGIIGSCFATWAFIQ

SEQ ID NO: 13530 - protein, 20 aa, Bos taurus
VVYSVVLAAGLPLNALALWV

SEQ ID NO: 13531 - protein, 20 aa, Bos taurus
VYALIFVVGVVGNLLVCLVI

SEQ ID NO: 13532 - protein, 20 aa, Bos taurus
PAGVFVVAFFARVALIFYGV

SEQ ID NO: 13533 - protein, 26 aa, Bos taurus
FLPIMYSIICFVGLLGNGLVMLTYIY

SEQ ID NO: 13534 - protein, 20 aa, Bos taurus
LSLALASLIVAANLLLAVGI

SEQ ID NO: 13535 - protein, 22 aa, Bos taurus
VLLPVVYSVICAVGLVGNAAVI

SEQ ID NO: 13536 - protein, 22 aa, Bos taurus
PVVYAVICAVGLAGNSAVLFVL

SEQ ID NO: 13537 - protein, 20 aa, Bos taurus
IVIGVALVGIMLTCGIGNFV

SEQ ID NO: 13538 - protein, 20 aa, Bos taurus
VIGMALVGIMLVCGIGNFIF

SEQ ID NO: 13539 - protein, 20 aa, Bos taurus
FFILVSILGILASGTILYAL

SEQ ID NO: 13540 - protein, 20 aa, Bos taurus
FLMTTAAQAISGFFVWTALL

SEQ ID NO: 13541 - protein, 22 aa, Bos taurus
ILLVLIICGLGIVGNIMVVLVV

SEQ ID NO: 13542 - protein, 22 aa, Bos taurus
FSIIFMTVGILSNSLAIAILMK

SEQ ID NO: 13543 - protein, 20 aa, Bos taurus
LIYACLLLFSVLLPLRLDGV

SEQ ID NO: 13544 - protein, 20 aa, Bos taurus
FCVAAWGFCFALSVLVVACE

SEQ ID NO: 13545 - protein, 20 aa, Bos taurus
LAVVLYLLSIVVAVPLCVWE

SEQ ID NO: 13546 - protein, 20 aa, Bos taurus
LLMTYTLWAVGGPAGLHHLY

SEQ ID NO: 13547 - protein, 20 aa, Bos taurus
TCVYFVLWLPSSSPSWVSAL

SEQ ID NO: 13548 - protein, 20 aa, Bos taurus
VLLGLIMCVSLAGNAILSLL

SEQ ID NO: 13549 - protein, 20 aa, Bos taurus
ALFHVALASCLCVATVHTGI

SEQ ID NO: 13550 - protein, 29 aa, Bos taurus
GLFVASHPWEVIVGTVTLTICMMSMNMFT

SEQ ID NO: 13551 - protein, 20 aa, Bos taurus
FGSLLGICLILQILTGLFLA

SEQ ID NO: 13552 - protein, 20 aa, Bos taurus
FMINILMLIIPILLAVAFLT

SEQ ID NO: 13553 - protein, 20 aa, Bos taurus
NAFVLLTVTAVIVGTILGFT

SEQ ID NO: 13554 - protein, 20 aa, Bos taurus
ILCVFQGIGKFILLLVFLYF

SEQ ID NO: 13555 - protein, 18 aa, Bos taurus
INPAPYTIITFPFLFAVM

SEQ ID NO: 13556 - protein, 20 aa, Bos taurus
ISQVVFVSNPISGILILVGL

SEQ ID NO: 13557 - protein, 19 aa, Bos taurus
WLLLSTVVAVVLGIVIGVL

SEQ ID NO: 13558 - protein, 20 aa, Bos taurus
VIMLFVPVTLCMIVVVATIK

SEQ ID NO: 13559 - protein, 20 aa, Bos taurus
GLFCASYPIPIILFTGLCIL

SEQ ID NO: 13560 - protein, 18 aa, Bos taurus
VNPALFTIITFPFLFAVM

SEQ ID NO: 13561 - protein, 20 aa, Bos taurus
ITLLGLAINMLTTLVLISYC

SEQ ID NO: 13562 - protein, 29 aa, Bos taurus
NLLVLLTVVAVVAGVALGLGVSGAGGAFA

SEQ ID NO: 13563 - protein, 20 aa, Bos taurus
FLVVLAVAVGLPFLALVYWF

SEQ ID NO: 13564 - protein, 20 aa, Bos taurus
VFLKLLAAGFYGVSSFLIVV

SEQ ID NO: 13565 - protein, 20 aa, Bos taurus
AVYRISFALAVFFFAFSLLM

SEQ ID NO: 13566 - protein, 20 aa, Bos taurus
LLFLAALALELLGGAGGSQQ

SEQ ID NO: 13567 - protein, 20 aa, Bos taurus
GMLFPAAFIGLFVFLYGVIT

SEQ ID NO: 13568 - protein, 22 aa, Bos taurus
FVLRALQIALVVSLYWVTSISM

SEQ ID NO: 13569 - protein, 20 aa, Bos taurus
GLVRVVFFPLFSSWWIQVTS

SEQ ID NO: 13570 - protein, 20 aa, Bos taurus
NTLPQLAATIIALSLQGVCL

SEQ ID NO: 13571 - protein, 20 aa, Bos taurus
IGTWLLYLPCTWSIGLAADP

SEQ ID NO: 13572 - protein, 20 aa, Bos taurus
LGALVLLLVLTLICSLVPVC

SEQ ID NO: 13573 - protein, 20 aa, Bos taurus
LLVAKILCMVGMFFFMLLGS

SEQ ID NO: 13574 - protein, 20 aa, Bos taurus
NLKYLSLGILVFQTTSLVLT

SEQ ID NO: 13575 - protein, 20 aa, Bos taurus
LRLPLCFLGVFVCYFYYGIL

SEQ ID NO: 13576 - protein, 20 aa, Bos taurus
VMSGLIVGILLVPQSIAYSL

SEQ ID NO: 13577 - protein, 20 aa, Bos taurus
VAMVFLLGLMFEITAKVSII

SEQ ID NO: 13578 - protein, 20 aa, Bos taurus
AWLFLFFLFWTGLVFIMGYS

SEQ ID NO: 13579 - protein, 20 aa, Bos taurus
WTLMLLLSTAMYGAHAPLLA

SEQ ID NO: 13580 - protein, 20 aa, Bos taurus
VVGRWLLVCSGTVAGAVILG

SEQ ID NO: 13581 - protein, 20 aa, Bos taurus
PMLLGLLGQFLVMPFYAFLM

SEQ ID NO: 13582 - protein, 20 aa, Bos taurus
SLLFEFLFFIYLLVALFIQY

SEQ ID NO: 13583 - protein, 20 aa, Bos taurus
SILFELQLFFCQLIALFVHY

SEQ ID NO: 13584 - protein, 19 aa, Bos taurus
VLLTRCPFWGCFSQLMLYA

SEQ ID NO: 13585 - protein, 20 aa, Bos taurus
HGLVLLTVSGVVAGAGLGAA

SEQ ID NO: 13586 - protein, 20 aa, Bos taurus
LDLVFTVVSALMIGLLMFSL

SEQ ID NO: 13587 - protein, 20 aa, Bos taurus
LYHTCLAVLSILVLFLLAML

SEQ ID NO: 13588 - protein, 20 aa, Bos taurus
WFILVSVIADLRNAFYVLFP

SEQ ID NO: 13589 - protein, 34 aa, Bos taurus
NYRGILNWCVVMLILSNARLFLENLIKYGILVDP

SEQ ID NO: 13590 - protein, 20 aa, Bos taurus
IMLFVPVTLCMVVVVATIKS

SEQ ID NO: 13591 - protein, 20 aa, Bos taurus
LVIGWCIFGLLLLAILAFCW

SEQ ID NO: 13592 - protein, 20 aa, Bos taurus
LSIINSMVLVFLLVGFVAVI

SEQ ID NO: 13593 - protein, 20 aa, Bos taurus
SIINSVVVVFFLSGILSMII

SEQ ID NO: 13594 - protein, 20 aa, Bos taurus
VWLWVTFLGDPKSLFLFYFP

SEQ ID NO: 13595 - protein, 20 aa, Bos taurus
LVLFIIALRICNCFLVQTSF

SEQ ID NO: 13596 - protein, 20 aa, Bos taurus
FFYRPHTITLLSFTIVSLMY

SEQ ID NO: 13597 - protein, 20 aa, Bos taurus
IDSSIMITSQILFFGFGWLF

SEQ ID NO: 13598 - protein, 20 aa, Bos taurus
ASAATGVFVLSLSAIPVTYV

SEQ ID NO: 13599 - protein, 20 aa, Bos taurus
FYIGLGLAMSSSIFIGGSFI

SEQ ID NO: 13600 - protein, 20 aa, Bos taurus
EWVKFCRQLFGGFSILLWIG

SEQ ID NO: 13601 - protein, 20 aa, Bos taurus
AANAFFLFIALLQQIPDVSP

SEQ ID NO: 13602 - protein, 20 aa, Bos taurus
LQDVTLIILEIAAIISLVLS

SEQ ID NO: 13603 - protein, 20 aa, Bos taurus
IARATVYFVAMVYMFLGVSI

SEQ ID NO: 13604 - protein, 20 aa, Bos taurus
LWKKYISQFKNPLIMLLLAS

SEQ ID NO: 13605 - protein, 20 aa, Bos taurus
EWVKFCRQLFGGFSMLLWIG

SEQ ID NO: 13606 - protein, 20 aa, Bos taurus
LWELVLEQFEDLLVRILLLA

SEQ ID NO: 13607 - protein, 20 aa, Bos taurus
PRFLYSQFRRAANSFFLFIA

SEQ ID NO: 13608 - protein, 20 aa, Bos taurus
ASEQALRLIISIFLGYPFAL

SEQ ID NO: 13609 - protein, 20 aa, Bos taurus
FIPGVLYEQFKFFLNLYFLI

SEQ ID NO: 13610 - protein, 20 aa, Bos taurus
IICCVLFFLFILGYIAVGIL

SEQ ID NO: 13611 - protein, 20 aa, Bos taurus
VSLVVVVVGGWTAVYLTDLV

SEQ ID NO: 13612 - protein, 32 aa, Bos taurus
WVICAMVGILTGLVACFIDIVVEKLAGLKYRL

SEQ ID NO: 13613 - protein, 27 aa, Bos taurus
LLVNLIGSLMGFVATVTLIPAFRGHFI

SEQ ID NO: 13614 - protein, 20 aa, Bos taurus
IICCVFLFLAIVGYVAVGII

SEQ ID NO: 13615 - protein, 20 aa, Bos taurus
PMLSVSSAMYTFLLGAIFIT

SEQ ID NO: 13616 - protein, 22 aa, Bos taurus
WLAPNLITFSGFLLVVFNFLLL

SEQ ID NO: 13617 - protein, 19 aa, Bos taurus
WTAITLFIFLVCCQIPLFG

SEQ ID NO: 13618 - protein, 20 aa, Bos taurus
INYGIILTLIPSGYLAGIFG

SEQ ID NO: 13619 - protein, 20 aa, Bos taurus
LIYALFLLVGVCVACVMLIP

SEQ ID NO: 13620 - protein, 19 aa, Bos taurus
WTAITLFIFLVCCQIPLFG

SEQ ID NO: 13621 - protein, 20 aa, Bos taurus
GLLLNLLVSICIVFLNKWIY

SEQ ID NO: 13622 - protein, 20 aa, Bos taurus
MALGIVILLLVDVIWVASSE

SEQ ID NO: 13623 - protein, 20 aa, Bos taurus
LTTGFIASIVAIVLFGSNFV

SEQ ID NO: 13624 - protein, 20 aa, Bos taurus
AVGSGGSTATAGPGAVSAGA

SEQ ID NO: 13625 - protein, 20 aa, Bos taurus
PIIFIIILLTIMLGTIIVMI

SEQ ID NO: 13626 - protein, 20 aa, Bos taurus
GWVVLHIFGMMYVFVALAIV

SEQ ID NO: 13627 - protein, 20 aa, Bos taurus
VFNLSNAIVGSGILGLSYAM

SEQ ID NO: 13628 - protein, 20 aa, Bos taurus
LLAGISVGLVQIPQVLMLGL

SEQ ID NO: 13629 - protein, 22 aa, Bos taurus
MSVFNLSNAIMGSGILGLAYAM

SEQ ID NO: 13630 - protein, 20 aa, Bos taurus
YIIFFSLGIGGLLPWNFFVT

SEQ ID NO: 13631 - protein, 20 aa, Bos taurus
LFLQGVAAVFMFAFASLYTQ

SEQ ID NO: 13632 - protein, 20 aa, Bos taurus
AIFIVVNACLGAGLLNFPAA

SEQ ID NO: 13633 - protein, 20 aa, Bos taurus
FGIATGGSNWFSALALGVTL

SEQ ID NO: 13634 - protein, 20 aa, Bos taurus
LLECLGFAGVLFGWTSLVFV

SEQ ID NO: 13635 - protein, 20 aa, Bos taurus
VILEQILFILGFASGYLFLG

SEQ ID NO: 13636 - protein, 20 aa, Bos taurus
FIAGISVGLTVIPQALAYAE

SEQ ID NO: 13637 - protein, 20 aa, Bos taurus
FLIHLLVCTFGMGSWVAING

SEQ ID NO: 13638 - protein, 20 aa, Bos taurus
VLVLSFGFLLLFTAYGGLQS

SEQ ID NO: 13639 - protein, 20 aa, Bos taurus
LFNLEMDISGLIPGLVSTFV

SEQ ID NO: 13640 - protein, 20 aa, Bos taurus
VVAVVFLGLLLDLLAFTLLL

SEQ ID NO: 13641 - protein, 20 aa, Bos taurus
WLLGLPTAVVYGSLALFVSV

SEQ ID NO: 13642 - protein, 20 aa, Bos taurus
LGACSLLSCASCLCGSAPCI

SEQ ID NO: 13643 - protein, 20 aa, Bos taurus
AVFNVVNSIIGSGIIGLPYS

SEQ ID NO: 13644 - protein, 20 aa, Bos taurus
IIAIMSGLGFCISFGIRCNL

SEQ ID NO: 13645 - protein, 20 aa, Bos taurus
IIAIMSGLGFCISFGIRCNL

SEQ ID NO: 13646 - protein, 20 aa, Bos taurus
AAFYGVTANLVLFLNGTAFG

SEQ ID NO: 13647 - protein, 28 aa, Bos taurus
HKDIGTLYLLFGAWAGMVGTALSLLIRA

SEQ ID NO: 13648 - protein, 20 aa, Bos taurus
ALAVLSLLAGALALAELLGA

SEQ ID NO: 13649 - protein, 21 aa, Bos taurus
LMLAVGGAVLGSLQFGYNTGV

SEQ ID NO: 13650 - protein, 20 aa, Bos taurus
FLLSVIGFAVDLANVWRFPY

SEQ ID NO: 13651 - protein, 20 aa, Bos taurus
FWRFMFYGIILYLGEVTKAV

SEQ ID NO: 13652 - protein, 20 aa, Bos taurus
VLAVFTAVLSSFQFGYDIGV

SEQ ID NO: 13653 - protein, 20 aa, Bos taurus
LATLIAAFGSSFQYGYNVAA

SEQ ID NO: 13654 - protein, 20 aa, Bos taurus
VFLAAFAAALGPLSFGFALG

SEQ ID NO: 13655 - protein, 18 aa, Bos taurus
EPLVFLANFALVLQGPVT

SEQ ID NO: 13656 - protein, 20 aa, Bos taurus
VLAVFSAVLGSLQFGYNIGV

SEQ ID NO: 13657 - protein, 20 aa, Bos taurus
PPRIFPSLLVVVALVGLLPV

SEQ ID NO: 13658 - protein, 20 aa, Bos taurus
LLLMLLLVAIAACTTLIVIT

SEQ ID NO: 13659 - protein, 20 aa, Bos taurus
LASFLFLYCACMSPVITFGG

SEQ ID NO: 13660 - protein, 24 aa, Bos taurus
IQALSAILFIYLATVTNAITFGGL

SEQ ID NO: 13661 - protein, 20 aa, Bos taurus
FVLSVAGGFVGLGNVWRFPY

SEQ ID NO: 13662 - protein, 24 aa, Bos taurus
FLLSVIGYAVDLGNVWRFPYICYQ

SEQ ID NO: 13663 - protein, 20 aa, Bos taurus
FLLSVAGEIIGLGNVWRFPY

SEQ ID NO: 13664 - protein, 20 aa, Bos taurus
FLILCLLSAAFAPIYVGIVF

SEQ ID NO: 13665 - protein, 25 aa, Bos taurus
IDFLLSVVGFAVDLANVWRFPYLCY

SEQ ID NO: 13666 - protein, 21 aa, Bos taurus
IFAISVATIGSFQFGYNTGVI

SEQ ID NO: 13667 - protein, 20 aa, Bos taurus
LILFIVFLALLLDNMLLTVV

SEQ ID NO: 13668 - protein, 20 aa, Bos taurus
FVLTSVGYAVGLGNVWRFPY

SEQ ID NO: 13669 - protein, 20 aa, Bos taurus
FVLGLALMADGVEVFVVGFV

SEQ ID NO: 13670 - protein, 20 aa, Bos taurus
VTAAVSGFLVGYELGIISGA

SEQ ID NO: 13671 - protein, 20 aa, Bos taurus
VILPLILLASHNTLQNFTAA

SEQ ID NO: 13672 - protein, 19 aa, Bos taurus
IFLVSECALMLAQGTVGAY

SEQ ID NO: 13673 - protein, 20 aa, Bos taurus
QLPLLCLLLQGATAILFAVF

SEQ ID NO: 13674 - protein, 20 aa, Bos taurus
YILAQVGFSVGLGNVWRFPY

SEQ ID NO: 13675 - protein, 20 aa, Bos taurus
YLWMVILGFIIAFILAFSVG

SEQ ID NO: 13676 - protein, 20 aa, Bos taurus
FIMSCVGFAVGLGNVWRFPY

SEQ ID NO: 13677 - protein, 19 aa, Bos taurus
IAIVALYFILVMCIGFFAM

SEQ ID NO: 13678 - protein, 20 aa, Bos taurus
VVENLLFSAVLLGWGSLLIM

SEQ ID NO: 13679 - protein, 20 aa, Bos taurus
IFLYFICAFQNISCGIHYLA

SEQ ID NO: 13680 - protein, 20 aa, Bos taurus
GWGWMVVLSAFFQSALVFGV

SEQ ID NO: 13681 - protein, 20 aa, Bos taurus
VLTGLAWMADAMEMMILSIL

SEQ ID NO: 13682 - protein, 20 aa, Bos taurus
LAHRLVVLLLMCFLGFGSYF

SEQ ID NO: 13683 - protein, 18 aa, Bos taurus
FLVDFAFLIVPLVTTLTI

SEQ ID NO: 13684 - protein, 17 aa, Bos taurus
WAFTGPGFLMSIAFLDP

SEQ ID NO: 13685 - protein, 20 aa, Bos taurus
FQILQMLLLCISSLITYPHI

SEQ ID NO: 13686 - protein, 20 aa, Bos taurus
RLPVACLLLEVALIALFGVF

SEQ ID NO: 13687 - protein, 22 aa, Bos taurus
HRMLSFSDALLSIIATVMEFDK

SEQ ID NO: 13688 - protein, 20 aa, Bos taurus
GGWGWAVVIGAFISIGFSYA

SEQ ID NO: 13689 - protein, 20 aa, Bos taurus
LAPGIWYRAFILLITFLIYT

SEQ ID NO: 13690 - protein, 20 aa, Bos taurus
FPLMAIGLEVVMIVLFALFV

SEQ ID NO: 13691 - protein, 20 aa, Bos taurus
LGYLARINLLVAICLGLYVR

SEQ ID NO: 13692 - protein, 20 aa, Bos taurus
IVIFLEFFAWGLLTTSMLTV

SEQ ID NO: 13693 - protein, 20 aa, Bos taurus
VALLALPRVLLPMHFLLPIF

SEQ ID NO: 13694 - protein, 20 aa, Bos taurus
ITGLSSGHSALIVAVLCYIN

SEQ ID NO: 13695 - protein, 20 aa, Bos taurus
MLVTAYLAFVVLLASCLGLE

SEQ ID NO: 13696 - protein, 20 aa, Bos taurus
FSHHHMVVFLLTFFSYSLLH

SEQ ID NO: 13697 - protein, 20 aa, Bos taurus
FVVELVWPLSLFLVLIWLRN

SEQ ID NO: 13698 - protein, 20 aa, Bos taurus
MIWVNSTAHSLLISFTSLLL

SEQ ID NO: 13699 - protein, 20 aa, Bos taurus
LKLLILSMAAVLSFSTRLFA

SEQ ID NO: 13700 - protein, 20 aa, Bos taurus
FAVWDYVVFAALFIISSGIG

SEQ ID NO: 13701 - protein, 18 aa, Bos taurus
SASVYTAGLTGILGLGIA

SEQ ID NO: 13702 - protein, 20 aa, Bos taurus
AGDIAVLVLYFLFVLAVGLW

SEQ ID NO: 13703 - protein, 20 aa, Bos taurus
LTVVDIAIIAVYFALNVAVG

SEQ ID NO: 13704 - protein, 20 aa, Bos taurus
FSSLSLVTLLLLTMPIMMMS

SEQ ID NO: 13705 - protein, 20 aa, Bos taurus
LISLGVGSCVGTGMYVVSGL

SEQ ID NO: 13706 - protein, 20 aa, Bos taurus
SVLAEAAVVFVVVLSIHAAV

SEQ ID NO: 13707 - protein, 20 aa, Bos taurus
VLFVCLCCGAAVLVYFILEA

SEQ ID NO: 13708 - protein, 20 aa, Bos taurus
QNTVLVWVPCSYLWVCFPFY

SEQ ID NO: 13709 - protein, 9 aa, Bos taurus
LIKLDLKTK

SEQ ID NO: 13710 - protein, 9 aa, Bos taurus
LVKLDVKTK

SEQ ID NO: 13711 - protein, 9 aa, Bos taurus
MVKIDLRTK

SEQ ID NO: 13712 - protein, 20 aa, Bos taurus
FFLVAITFLLFDLEIALLLP

SEQ ID NO: 13713 - protein, 20 aa, Bos taurus
SLLCLEGMMLSLFVMAALTI

SEQ ID NO: 13714 - protein, 24 aa, Bos taurus
IHTAKFALVFPLMYHTWNGIRHLM

SEQ ID NO: 13715 - protein, 20 aa, Bos taurus
FYPIFIITLWMAGWYFNQVF

SEQ ID NO: 13716 - protein, 20 aa, Bos taurus
VKLALAIFVICQLGNFSIHM

SEQ ID NO: 13717 - protein, 20 aa, Bos taurus
GAILNISSASGMYPVPLLTI

SEQ ID NO: 13718 - protein, 20 aa, Bos taurus
LALLGVGGVFVLSSFLALGF

SEQ ID NO: 13719 - protein, 20 aa, Bos taurus
PLVMLGMVAGALLADFLSGL

SEQ ID NO: 13720 - protein, 20 aa, Bos taurus
WLFFWAYAFGGCVNHSLTLA

SEQ ID NO: 13721 - protein, 20 aa, Bos taurus
IGNLVLYILIIIHWNACIYF

SEQ ID NO: 13722 - protein, 20 aa, Bos taurus
VGSLLLPLLLLLLLLLWYCQ

SEQ ID NO: 13723 - protein, 20 aa, Bos taurus
IVVVSSVMGLQGVVFNEVYA

SEQ ID NO: 13724 - protein, 20 aa, Bos taurus
GAYIAAGVLFALVVMLYVIW

SEQ ID NO: 13725 - protein, 20 aa, Bos taurus
WLTIQGGLLGSGLFVFSLTA

SEQ ID NO: 13726 - protein, 20 aa, Bos taurus
IILCLMGAFFYLISPLDFVP

SEQ ID NO: 13727 - protein, 20 aa, Bos taurus
AATAVGGGFLLLQIASHSGY

SEQ ID NO: 13728 - protein, 20 aa, Bos taurus
VMLSLLFAAPFAVILVCYVL

SEQ ID NO: 13729 - protein, 20 aa, Bos taurus
AATLLCHSLLPLGYYVGMCF

SEQ ID NO: 13730 - protein, 22 aa, Bos taurus
IELSIGIILGISTMAAAALGNL

SEQ ID NO: 13731 - protein, 20 aa, Bos taurus
PGLRKVLFATALGTVALALA

SEQ ID NO: 13732 - protein, 20 aa, Bos taurus
FFISFLISLGWNWMYLYKLA

SEQ ID NO: 13733 - protein, 20 aa, Bos taurus
IWEGLTLSFHRVIALDFLGF

SEQ ID NO: 13734 - protein, 20 aa, Bos taurus
IASFWNKAFLTIIILLIVLF

SEQ ID NO: 13735 - protein, 20 aa, Bos taurus
IKWVISVAFYILQAALMVSL

SEQ ID NO: 13736 - protein, 20 aa, Bos taurus
VGHFLCLVTLVYCAEYINEV

SEQ ID NO: 13737 - protein, 20 aa, Bos taurus
FAPSTIVFHLGHAAMLGLMY

SEQ ID NO: 13738 - protein, 21 aa, Bos taurus
TMMVCMMAWRPIQALMAISAT

SEQ ID NO: 13739 - protein, 20 aa, Bos taurus
FLFFLAVGGVYHPRIVSGLG

SEQ ID NO: 13740 - protein, 20 aa, Bos taurus
LVTVLMLISLHWFIFLLNLP

SEQ ID NO: 13741 - protein, 20 aa, Bos taurus
RGLNVMMMGAGPAHAMYFAC

SEQ ID NO: 13742 - protein, 15 aa, Bos taurus
VTNVLPMILIGGWIN

SEQ ID NO: 13743 - protein, 20 aa, Bos taurus
GFIFYLLASILLSLLLILKA

SEQ ID NO: 13744 - protein, 20 aa, Bos taurus
MSYAKNFAIVGAMFSCTECL

SEQ ID NO: 13745 - protein, 20 aa, Bos taurus
LIHAFFCVMFLCAAEWLTLG

SEQ ID NO: 13746 - protein, 20 aa, Bos taurus
FNSFLSGFISCVGSFILAVC

SEQ ID NO: 13747 - protein, 20 aa, Bos taurus
AATAVGGGFFLLQLANHTGY

SEQ ID NO: 13748 - protein, 20 aa, Bos taurus
MDYSLAATLTLHSHWGIGQV

SEQ ID NO: 13749 - protein, 20 aa, Bos taurus
GWAQVMFQFLSQGFCYGAGL

SEQ ID NO: 13750 - protein, 20 aa, Bos taurus
ILGFFAGLIPRLLGDIISLW

SEQ ID NO: 13751 - protein, 20 aa, Bos taurus
IFFAVCISLSSITACILIYW

SEQ ID NO: 13752 - protein, 20 aa, Bos taurus
FYVALTGTSSLISGLILIFE

SEQ ID NO: 13753 - protein, 20 aa, Bos taurus
ALWANTLGSLALLYSAFGVI

SEQ ID NO: 13754 - protein, 20 aa, Bos taurus
VSMFAVGCSMGPFLHYWYLW

SEQ ID NO: 13755 - protein, 20 aa, Bos taurus
GWYIVTYALGIYHLNLFIAF

SEQ ID NO: 13756 - protein, 20 aa, Bos taurus
FSVIFVFLGALIVTAILLLF

SEQ ID NO: 13757 - protein, 20 aa, Bos taurus
GGVLSLIAGLFVGFLAGYGA

SEQ ID NO: 13758 - protein, 19 aa, Bos taurus
VTTKIYTSVHIMSLGLLHI

SEQ ID NO: 13759 - protein, 20 aa, Bos taurus
LLLPAAVFLLVLLPAAAVVY

SEQ ID NO: 13760 - protein, 20 aa, Bos taurus
FFLLGGLCVVWGGASYVVGL

SEQ ID NO: 13761 - protein, 20 aa, Bos taurus
GGGVAAGSLVATLQSVGAAG

SEQ ID NO: 13762 - protein, 20 aa, Bos taurus
LGVSVGSLMVPVFVVLLGVV

SEQ ID NO: 13763 - protein, 16 aa, Bos taurus
QIGGSFAVWGGLFSTI

SEQ ID NO: 13764 - protein, 20 aa, Bos taurus
IMEGLASSFLFTMGGLGFII

SEQ ID NO: 13765 - protein, 20 aa, Bos taurus
LLGFWSLLIISLTAGFSCCS

SEQ ID NO: 13766 - protein, 20 aa, Bos taurus
LLLKALLLSSYGKLLLIPAV

SEQ ID NO: 13767 - protein, 17 aa, Bos taurus
FWAWMALLFSLAVYGAS

SEQ ID NO: 13768 - protein, 20 aa, Bos taurus
LAVPISNSLAIIFTLIVGKV

SEQ ID NO: 13769 - protein, 20 aa, Bos taurus
VHAWYWLAWMIHVGESLYAI

SEQ ID NO: 13770 - protein, 20 aa, Bos taurus
MTTALPLGPGILGLLTGIVT

SEQ ID NO: 13771 - protein, 20 aa, Bos taurus
FLHCSTVIPTVVLTLKFTMH

SEQ ID NO: 13772 - protein, 18 aa, Bos taurus
MTLSISVLLSLTVFLLVI

SEQ ID NO: 13773 - protein, 18 aa, Bos taurus
CTVSINVLLAQTVFLFLI

SEQ ID NO: 13774 - protein, 28 aa, Bos taurus
YLINVIHAFQYVIYGTASFFFLYGALLL

SEQ ID NO: 13775 - protein, 17 aa, Bos taurus
MGLSIFALLTLTVFLLL

SEQ ID NO: 13776 - protein, 17 aa, Bos taurus
MAISVLLAQSVFLLLIS

SEQ ID NO: 13777 - protein, 21 aa, Bos taurus
VPARTVFGVTTVLTMTTLSIS

SEQ ID NO: 13778 - protein, 22 aa, Bos taurus
ASAARVALGITTVLTMTTISTH

SEQ ID NO: 13779 - protein, 19 aa, Bos taurus
ARVALGITTVLTMTTINTH

SEQ ID NO: 13780 - protein, 18 aa, Bos taurus
CTVAINVLLAQTVFLFLV

SEQ ID NO: 13781 - protein, 16 aa, Bos taurus
SLIGVGVLSCVFNSLA

SEQ ID NO: 13782 - protein, 20 aa, Bos taurus
FWVLQIIFVSVPTLLYLAHV

SEQ ID NO: 13783 - protein, 21 aa, Bos taurus
VPARTVFGITTVLTMTTLSIS

SEQ ID NO: 13784 - protein, 20 aa, Bos taurus
FMILSSLCATSGIIMGIVAF

SEQ ID NO: 13785 - protein, 23 aa, Bos taurus
FVTVAVFAFLYSMGALATYIFLQ

SEQ ID NO: 13786 - protein, 22 aa, Bos taurus
AVPARTSLGITTVLTMTTLSTI

SEQ ID NO: 13787 - protein, 20 aa, Bos taurus
FYTGVYILIGAGALMMLVGF

SEQ ID NO: 13788 - protein, 26 aa, Bos taurus
VFAGAWIAIFCGFSFFVVASFGVGAA

SEQ ID NO: 13789 - protein, 20 aa, Bos taurus
IGMFVGICLFCLSVLGIVGI

SEQ ID NO: 13790 - protein, 20 aa, Bos taurus
ISHVRFWVLQIIFVSTPTLI

SEQ ID NO: 13791 - protein, 19 aa, Bos taurus
VALAASAVALGTGLVGSGA

SEQ ID NO: 13792 - protein, 18 aa, Bos taurus
ISLGITVLLSLTVFMLLV

SEQ ID NO: 13793 - protein, 20 aa, Bos taurus
PARVGLGITTVLTMTTQSSG

SEQ ID NO: 13794 - protein, 18 aa, Bos taurus
VTLCISVLLSLTVFLLVI

SEQ ID NO: 13795 - protein, 21 aa, Bos taurus
VPARTVFGVTTVLTMTTLSIS

SEQ ID NO: 13796 - protein, 20 aa, Bos taurus
VSLGITTVLTMSTIITGVNA

SEQ ID NO: 13797 - protein, 23 aa, Bos taurus
FCIIYSVIGIPFTLLFLTAVVQR

SEQ ID NO: 13798 - protein, 20 aa, Bos taurus
YLVAFHLFFVMFVWSYWMTI

SEQ ID NO: 13799 - protein, 20 aa, Bos taurus
FIMLINWTVMILYNYFNAMF

SEQ ID NO: 13800 - protein, 20 aa, Bos taurus
IYGASAGALTATALVTGACL

SEQ ID NO: 13801 - protein, 24 aa, Bos taurus
KWLVLHLASQQMGLLIKGICSLAE

SEQ ID NO: 13802 - protein, 20 aa, Bos taurus
IYRAQVNCSEYFPLFLAMLW

SEQ ID NO: 13803 - protein, 20 aa, Bos taurus
TMILSTILCCIAFLIFLLQL

SEQ ID NO: 13804 - protein, 25 aa, Bos taurus
NGSLITILVIAGVFWVHRLIKFIYN

SEQ ID NO: 13805 - protein, 20 aa, Bos taurus
ILIAVGAVMMFVGFLGCYGA

SEQ ID NO: 13806 - protein, 20 aa, Bos taurus
VLMNLLFALLLDLLLVSLIK

SEQ ID NO: 13807 - protein, 20 aa, Bos taurus
ALIVIAILLAVFGLLVALVG

SEQ ID NO: 13808 - protein, 29 aa, Bos taurus
NDPDVERCLRAHRNDMETIYPFLFLGFVY

SEQ ID NO: 13809 - protein, 20 aa, Bos taurus
AARVPLGIFSVLSLASECTT

SEQ ID NO: 13810 - protein, 20 aa, Bos taurus
IPGILIIIFYGIAMFCLVAL

SEQ ID NO: 13811 - protein, 20 aa, Bos taurus
WFTLFYFGNGWIPTIITAFV

SEQ ID NO: 13812 - protein, 20 aa, Bos taurus
YFPYLVLIHTLVFMLCSNFW

SEQ ID NO: 13813 - protein, 20 aa, Bos taurus
VVFLFVLANFSMATFMDPGV

SEQ ID NO: 13814 - protein, 19 aa, Bos taurus
LWSLQLILVSTPALLVAMH

SEQ ID NO: 13815 - protein, 21 aa, Bos taurus
VPARTVFGVTTVLTMTTLSIS

SEQ ID NO: 13816 - protein, 21 aa, Bos taurus
VPARTVFGVTTVLTMTTLSIS

SEQ ID NO: 13817 - protein, 20 aa, Bos taurus
IIPVVMAGIIAIYGLVVAVL

SEQ ID NO: 13818 - protein, 20 aa, Bos taurus
SSVFPILSVTLLFFGGLCVA

SEQ ID NO: 13819 - protein, 20 aa, Bos taurus
IYGIAAAFFVYGILLMVEGF

SEQ ID NO: 13820 - protein, 20 aa, Bos taurus
ALTVGAVLLALVALFVTLAG

SEQ ID NO: 13821 - protein, 20 aa, Bos taurus
LTLLWAYFCFLLTALGVTAG

SEQ ID NO: 13822 - protein, 20 aa, Bos taurus
PLSGYYLGRLMFIVISEPDM

SEQ ID NO: 13823 - protein, 20 aa, Bos taurus
LEFIYNKTGWAMVSLCIVFA

SEQ ID NO: 13824 - protein, 20 aa, Bos taurus
FLFCELVFQLPFFPIAAYAF

SEQ ID NO: 13825 - protein, 20 aa, Bos taurus
PLFLLIGLPTIPVMLILGKM

SEQ ID NO: 13826 - protein, 20 aa, Bos taurus
WHFFYSHWNLILIVFHYYQA

SEQ ID NO: 13827 - protein, 20 aa, Bos taurus
LSPAIPVFAAMLFLFSMATL

SEQ ID NO: 13828 - protein, 20 aa, Bos taurus
VVGFLSPFNMILGGIVVVLV

SEQ ID NO: 13829 - protein, 20 aa, Bos taurus
ELAYVPIIGWMWYFTEMVFC

SEQ ID NO: 13830 - protein, 22 aa, Bos taurus
SVPARTCIGVTTVLSMTTLMIG

SEQ ID NO: 13831 - protein, 20 aa, Bos taurus
IFGCIFYTLQLLLGCLQGRW

SEQ ID NO: 13832 - protein, 20 aa, Bos taurus
ALIVICIILAVFGVLLSVVG

SEQ ID NO: 13833 - protein, 20 aa, Bos taurus
ALMVIGILLGLIAIFVATVG

SEQ ID NO: 13834 - protein, 20 aa, Bos taurus
MCIAIAISVLMILICAMATY

SEQ ID NO: 13835 - protein, 20 aa, Bos taurus
ICLCTSVLVSLTVFLLVIEE

SEQ ID NO: 13836 - protein, 20 aa, Bos taurus
IYTYIWVLFYYLMGALGITA

SEQ ID NO: 13837 - protein, 20 aa, Bos taurus
LLPVVIIAVGAFLFLVAFVG

SEQ ID NO: 13838 - protein, 20 aa, Bos taurus
WVMFVSVTAFVCSLLFLGVF

SEQ ID NO: 13839 - protein, 20 aa, Bos taurus
FGVALGLGAFLACSCFLLLD

SEQ ID NO: 13840 - protein, 22 aa, Bos taurus
LWALQLIFVSTPALLVAMHVAY

SEQ ID NO: 13841 - protein, 20 aa, Bos taurus
FWAFQVTLVAVPSALYMGFI

SEQ ID NO: 13842 - protein, 20 aa, Bos taurus
FIVVTIIILITLIEAIRLYL

SEQ ID NO: 13843 - protein, 22 aa, Bos taurus
YWVLQFLFVSTPTLVYLGHVIY

SEQ ID NO: 13844 - protein, 20 aa, Bos taurus
VMFVAVFLWLVTIIFFVLYL

SEQ ID NO: 13845 - protein, 20 aa, Bos taurus
LVGRFVPFAAVAAANCINIP

SEQ ID NO: 13846 - protein, 20 aa, Bos taurus
AIGVLAFLASAFFFVVDIYF

SEQ ID NO: 13847 - protein, 20 aa, Bos taurus
LAYPFQSLLYLLLALSTVSA

SEQ ID NO: 13848 - protein, 20 aa, Bos taurus
FLAEVLFAVTSMLSFTRLAS

SEQ ID NO: 13849 - protein, 20 aa, Bos taurus
IVCLNSVLALSAIPGAIDYC

SEQ ID NO: 13850 - protein, 20 aa, Bos taurus
AIAIFSLGFIIVGTLCALLS

SEQ ID NO: 13851 - protein, 19 aa, Bos taurus
GNGINVLKIAPEYAIKFSV

SEQ ID NO: 13852 - protein, 20 aa, Bos taurus
TNFLFFGPLGFSFFFNMLFV

SEQ ID NO: 13853 - protein, 20 aa, Bos taurus
ALMIVGIVLSVIGLLVAIFA

SEQ ID NO: 13854 - protein, 20 aa, Bos taurus
YWVLQVIFVSTPSLVYLGHA

SEQ ID NO: 13855 - protein, 24 aa, Bos taurus
VYTANQNCVDAYPTFLVMLWSAGL

SEQ ID NO: 13856 - protein, 20 aa, Bos taurus
ATNFGLAFLWLILFTPCSYV

SEQ ID NO: 13857 - protein, 20 aa, Bos taurus
VWLFLVVGGVMFILGFAGCI

SEQ ID NO: 13858 - protein, 20 aa, Bos taurus
FFVLLSMVLILGCITCFALF

SEQ ID NO: 13859 - protein, 20 aa, Bos taurus
ALLLGGAAIILIAFLVGLIS

SEQ ID NO: 13860 - protein, 20 aa, Bos taurus
AIILILLGVVMFIVSFIGVL

SEQ ID NO: 13861 - protein, 17 aa, Bos taurus
MLLVALAVFFGACYILY

SEQ ID NO: 13862 - protein, 20 aa, Bos taurus
FPVVHPVMIAVCCFLIIVGM

SEQ ID NO: 13863 - protein, 20 aa, Bos taurus
FWVFQIVVISTPSVMYLGYA

SEQ ID NO: 13864 - protein, 19 aa, Bos taurus
FWVFQIILVATPSVMYLGY

SEQ ID NO: 13865 - protein, 20 aa, Bos taurus
VWLMAGFVGGGLMVLCPGIS

SEQ ID NO: 13866 - protein, 24 aa, Bos taurus
IQACRALMITAILLGFLGLFLGMV

SEQ ID NO: 13867 - protein, 20 aa, Bos taurus
FCILAVLWGLISTAFLVMSC

SEQ ID NO: 13868 - protein, 20 aa, Bos taurus
LLFLTGLSLIIGLRRTFSFF

SEQ ID NO: 13869 - protein, 20 aa, Bos taurus
YQWEYPYLLSVVPSLLGLLS

SEQ ID NO: 13870 - protein, 20 aa, Bos taurus
LVLDVVMLFLYLGVEVIRLF

SEQ ID NO: 13871 - protein, 20 aa, Bos taurus
AFSVFFVCVAFTSNIICLLF

SEQ ID NO: 13872 - protein, 20 aa, Bos taurus
ALLAIGNVLFVAGLAFVIGL

SEQ ID NO: 13873 - protein, 20 aa, Bos taurus
MGVVALGLLTCLLAMLLAGR

SEQ ID NO: 13874 - protein, 20 aa, Bos taurus
ALMVVSLVLGFLATFVATMG

SEQ ID NO: 13875 - protein, 20 aa, Bos taurus
ALMIAASVLGLPAILLLLTV

SEQ ID NO: 13876 - protein, 20 aa, Bos taurus
VYWPLFVLIFHAISPIPHFI

SEQ ID NO: 13877 - protein, 20 aa, Bos taurus
AILLIVVGILMFLLTFCGCI

SEQ ID NO: 13878 - protein, 20 aa, Bos taurus
FAYIGLELISFILLLTDLLF

SEQ ID NO: 13879 - protein, 20 aa, Bos taurus
LATAYILVVAGIVVMVTGAL

SEQ ID NO: 13880 - protein, 20 aa, Bos taurus
AGSVPSLAAGLLFGGLAGLG

SEQ ID NO: 13881 - protein, 22 aa, Bos taurus
LWALQLIFVTCPSLLVILHVAY

SEQ ID NO: 13882 - protein, 14 aa, Bos taurus
VLVIVGSVIMVVAF

SEQ ID NO: 13883 - protein, 20 aa, Bos taurus
VWLFVVVGGVMSVLGFAGCI

SEQ ID NO: 13884 - protein, 20 aa, Bos taurus
SGFGLSILWILLFTPCSFVC

SEQ ID NO: 13885 - protein, 20 aa, Bos taurus
PLHSLLAFVGANLVFWFLAL

SEQ ID NO: 13886 - protein, 20 aa, Bos taurus
GLMIAAVSLGFFGSIFALIG

SEQ ID NO: 13887 - protein, 20 aa, Bos taurus
ILLRKSIGALEVACGIVMTL

SEQ ID NO: 13888 - protein, 22 aa, Bos taurus
LWALQLIFVSTPALLVAMHVAY

SEQ ID NO: 13889 - protein, 33 aa, Bos taurus
LRTDDRVERVRRAHLNDLENIVPFLGIGLLYSL

SEQ ID NO: 13890 - protein, 20 aa, Bos taurus
MVTYMAVGGGLMAAALPMLG

SEQ ID NO: 13891 - protein, 20 aa, Bos taurus
AMMVTSSAMSSLACIVSVVG

SEQ ID NO: 13892 - protein, 22 aa, Bos taurus
IRYWVFQIIMVCTPSLCFITYS

SEQ ID NO: 13893 - protein, 20 aa, Bos taurus
LCISVLLALTVFLLLISKIV

SEQ ID NO: 13894 - protein, 21 aa, Bos taurus
VMVGLAWTLSILISFIPVQLH

SEQ ID NO: 13895 - protein, 26 aa, Bos taurus
VQATMILSIIFSVLSLFLFFCQLFTL

SEQ ID NO: 13896 - protein, 20 aa, Bos taurus
ALMITADILAGFGFITLLLG

SEQ ID NO: 13897 - protein, 20 aa, Bos taurus
VFTYPHSCLVLDLTLLFLMG

SEQ ID NO: 13898 - protein, 20 aa, Bos taurus
SPLVFALGITILGVCHYTLT

SEQ ID NO: 13899 - protein, 20 aa, Bos taurus
LLIFFSVVNVSVGLLGAFAY

SEQ ID NO: 13900 - protein, 20 aa, Bos taurus
LFIIQDIAILFNIIIIFLMF

SEQ ID NO: 13901 - protein, 20 aa, Bos taurus
APILANFVHIIIVILGLFGT

SEQ ID NO: 13902 - protein, 20 aa, Bos taurus
AISGYLVWGGIFFIISGSLS

SEQ ID NO: 13903 - protein, 20 aa, Bos taurus
LVATAALAAGQLTFVLGLTG

SEQ ID NO: 13904 - protein, 20 aa, Bos taurus
FALPLSILIAMGALLLCLIG

SEQ ID NO: 13905 - protein, 20 aa, Bos taurus
ILIFAGALVMVTGFLGFGAV

SEQ ID NO: 13906 - protein, 20 aa, Bos taurus
ALLSISLIMWNALYTAEKVI

SEQ ID NO: 13907 - protein, 20 aa, Bos taurus
FGWVMFVAVFYWVLTVFFLI

SEQ ID NO: 13908 - protein, 20 aa, Bos taurus
LSTMSFVLNALTCALGLLYF

SEQ ID NO: 13909 - protein, 20 aa, Bos taurus
GASLLCNLIGFGYPAYVSIK

SEQ ID NO: 13910 - protein, 18 aa, Bos taurus
CELFSSSFIACMVTIILL

SEQ ID NO: 13911 - protein, 20 aa, Bos taurus
LYGLAAIGVPALALFLIGVI

SEQ ID NO: 13912 - protein, 20 aa, Bos taurus
LHTLLSALVVAVALGMLVCA

SEQ ID NO: 13913 - protein, 14 aa, Bos taurus
VLAVSGILTMGLAL

SEQ ID NO: 13914 - protein, 16 aa, Bos taurus
VATVAVAFHANLNYVW

SEQ ID NO: 13915 - protein, 20 aa, Bos taurus
TMASLGCGFVGPVVGGWYRV

SEQ ID NO: 13916 - protein, 14 aa, Bos taurus
ILIFVGAVIMILGF

SEQ ID NO: 13917 - protein, 20 aa, Bos taurus
AIYGFFFTGPLGHFFYLLME

SEQ ID NO: 13918 - protein, 20 aa, Bos taurus
CSIAVGAGLLAFLSSLAFLA

SEQ ID NO: 13919 - protein, 20 aa, Bos taurus
ILAFLIPFVACIFQCYLYLF

SEQ ID NO: 13920 - protein, 20 aa, Bos taurus
QVVFTACMTLTAHPGVFPVT

SEQ ID NO: 13921 - protein, 20 aa, Bos taurus
GCSLWGIFFIISGISIIRAT

SEQ ID NO: 13922 - protein, 20 aa, Bos taurus
IIGGVIAVGVFLLLIAVAGL

SEQ ID NO: 13923 - protein, 20 aa, Bos taurus
ILIVVLSLSFMHNLLLGFEF

SEQ ID NO: 13924 - protein, 20 aa, Bos taurus
VPFVLIGTGTVIILLGTFGC

SEQ ID NO: 13925 - protein, 20 aa, Bos taurus
ILHVTQARIAAGLPMAVIPF

SEQ ID NO: 13926 - protein, 20 aa, Bos taurus
QYWPLFVLFFYILSPIPYCI

SEQ ID NO: 13927 - protein, 20 aa, Bos taurus
VISVGSGLLSVSLGLVALLA

SEQ ID NO: 13928 - protein, 21 aa, Bos taurus
LIQSAVLYSVMTLVSTYLVAF

SEQ ID NO: 13929 - protein, 19 aa, Bos taurus
NLLKSCAFYWGFTSWIAYY

SEQ ID NO: 13930 - protein, 20 aa, Bos taurus
HAFHTCGVFSTLAFFMINAV

SEQ ID NO: 13931 - protein, 20 aa, Bos taurus
LIPAVVIIAVGALLFIIGLI

SEQ ID NO: 13932 - protein, 20 aa, Bos taurus
FVNVGYFLIAAGAVLFALGF

SEQ ID NO: 13933 - protein, 20 aa, Bos taurus
ISCFEWWFPGIIGAGVMAIP

SEQ ID NO: 13934 - protein, 20 aa, Bos taurus
FEGICFSGIMMLVVAAVLLV

SEQ ID NO: 13935 - protein, 20 aa, Bos taurus
VVGVVIAVGIFLFLIALVGL

SEQ ID NO: 13936 - protein, 20 aa, Bos taurus
TGLASSLIGYVLFDFIDGGE

SEQ ID NO: 13937 - protein, 21 aa, Bos taurus
WVMFASVFCFVATTVLAFLYV

SEQ ID NO: 13938 - protein, 20 aa, Bos taurus
ILSVTSAIVVITSGISVIVL

SEQ ID NO: 13939 - protein, 20 aa, Bos taurus
LLITGAYILLAMGGLLFLLG

SEQ ID NO: 13940 - protein, 20 aa, Bos taurus
WWIAGGSGANFGLALLWLLL

SEQ ID NO: 13941 - protein, 20 aa, Bos taurus
VQVLMVLSLILCCLSFILFM

SEQ ID NO: 13942 - protein, 20 aa, Bos taurus
LAALQRGLAPALLYQFLMNG

SEQ ID NO: 13943 - protein, 20 aa, Bos taurus
MMLKIAGPACAVVGLGAVIL

SEQ ID NO: 13944 - protein, 20 aa, Bos taurus
FPGVTSVWALFIYGTSILIV

SEQ ID NO: 13945 - protein, 20 aa, Bos taurus
VLFAVSVLMFIISSMLVYGA

SEQ ID NO: 13946 - protein, 20 aa, Bos taurus
GYSFLSVIEMIFAAIFFVVY

SEQ ID NO: 13947 - protein, 20 aa, Bos taurus
SGAPIWTGAVAVLAGAVAFI

SEQ ID NO: 13948 - protein, 20 aa, Bos taurus
LAVGTALCLLALLVLVKQLM

SEQ ID NO: 13949 - protein, 20 aa, Bos taurus
GFCVLGIIMMATTNSLMWTF

SEQ ID NO: 13950 - protein, 20 aa, Bos taurus
LFPFYFHISMGCAFVNLCIL

SEQ ID NO: 13951 - protein, 20 aa, Bos taurus
WFLFGSALLLVSVSIAFYCI

SEQ ID NO: 13952 - protein, 20 aa, Bos taurus
MLGPGWVPSTLAALILAISQ

SEQ ID NO: 13953 - protein, 20 aa, Bos taurus
WMYLIYTIMFLGALGMMLGL

SEQ ID NO: 13954 - protein, 20 aa, Bos taurus
LGIGLAISLSVVGAAWGIYI

SEQ ID NO: 13955 - protein, 20 aa, Bos taurus
YFLALTFFVAAFHLLFDFLA

SEQ ID NO: 13956 - protein, 20 aa, Bos taurus
GGPQFAEVFVIVWFGAVTIT

SEQ ID NO: 13957 - protein, 20 aa, Bos taurus
FYYSTGMSVGIVASLLIIIF

SEQ ID NO: 13958 - protein, 20 aa, Bos taurus
YACFGLFGIIALQTIAYSIL

SEQ ID NO: 13959 - protein, 20 aa, Bos taurus
LCYVFLIWMLTLVAIVPNLC

SEQ ID NO: 13960 - protein, 20 aa, Bos taurus
SPIYGGLGLIVSGGVGCGIV

SEQ ID NO: 13961 - protein, 20 aa, Bos taurus
WILAPIWGTLYSAMGYGSYM

SEQ ID NO: 13962 - protein, 20 aa, Bos taurus
GIPPGPAPWPVVGNFGFVLL

SEQ ID NO: 13963 - protein, 23 aa, Bos taurus
ALALLGLGISSFILVSGCANMVL

SEQ ID NO: 13964 - protein, 20 aa, Bos taurus
FLGVYSFGLFTTTIFANAGQ

SEQ ID NO: 13965 - protein, 20 aa, Bos taurus
CVTWNCIAALLVGCAGIGVG

SEQ ID NO: 13966 - protein, 20 aa, Bos taurus
VSSFLLITMLFIISLSLLVG

SEQ ID NO: 13967 - protein, 20 aa, Bos taurus
LSVRSVFFGVFQSFVVLLYI

SEQ ID NO: 13968 - protein, 20 aa, Bos taurus
WWGAIAACTVLARCLVFPLI

SEQ ID NO: 13969 - protein, 20 aa, Bos taurus
ALVWVVMEVLALLLGIYLAT

SEQ ID NO: 13970 - protein, 20 aa, Bos taurus
WVVFIDCVGVGLLISTLMWF

SEQ ID NO: 13971 - protein, 20 aa, Bos taurus
FVVLHLILQGMVYTEYTWEI

SEQ ID NO: 13972 - protein, 20 aa, Bos taurus
IQFGYVYGISAIGCLGMFCL

SEQ ID NO: 13973 - protein, 20 aa, Bos taurus
LGTAYVSATTGAVATALGLN

SEQ ID NO: 13974 - protein, 20 aa, Bos taurus
VFATFPIVLGILVYGLSLLC

SEQ ID NO: 13975 - protein, 22 aa, Bos taurus
SVRQMAVSYITATTTAVATAVG

SEQ ID NO: 13976 - protein, 20 aa, Bos taurus
IFLLVAGLLLTVLVIVGAFL

SEQ ID NO: 13977 - protein, 20 aa, Bos taurus
FGYVYGMSAIGCLGIHALLN

SEQ ID NO: 13978 - protein, 20 aa, Bos taurus
LFRLQLALFVNSLMLLGSIY

SEQ ID NO: 13979 - protein, 20 aa, Bos taurus
LNFGLNVVENVALLVLTYVS

SEQ ID NO: 13980 - protein, 20 aa, Bos taurus
FLNVLAGALFGPWLGLLLCC

SEQ ID NO: 13981 - protein, 20 aa, Bos taurus
WLEFFLTSIFSALWVLPLFV

SEQ ID NO: 13982 - protein, 20 aa, Bos taurus
AHLYNFLLLKIFLFNHWLLG

SEQ ID NO: 13983 - protein, 20 aa, Bos taurus
LLLGAGVIVSSTFLGLFPRL

SEQ ID NO: 13984 - protein, 20 aa, Bos taurus
SRIIKYMIWFSTAVLIGLYV

SEQ ID NO: 13985 - protein, 20 aa, Bos taurus
NLLLVALCLTFGVEVGFKFA

SEQ ID NO: 13986 - protein, 20 aa, Bos taurus
FLLCVNYFFYGETVTDYFFT

SEQ ID NO: 13987 - protein, 17 aa, Bos taurus
WWVPPCCGTAAAVVGLL

SEQ ID NO: 13988 - protein, 20 aa, Bos taurus
LLYFIALAIGTLYSNALFQL

SEQ ID NO: 13989 - protein, 20 aa, Bos taurus
MMYFCQMLAAVESINAAIGV

SEQ ID NO: 13990 - protein, 20 aa, Bos taurus
AWLVVDSIVDVIFLVDIVLN

SEQ ID NO: 13991 - protein, 20 aa, Bos taurus
ALALARAPAACLNFNCMLIL

SEQ ID NO: 13992 - protein, 19 aa, Bos taurus
MVLISLCFGLSIATMVQCF

SEQ ID NO: 13993 - protein, 24 aa, Bos taurus
LANVIRYFPTQALNFAFKDKYKQI

SEQ ID NO: 13994 - protein, 22 aa, Bos taurus
LHVLQVALAFGLALATLVQAVG

SEQ ID NO: 13995 - protein, 22 aa, Bos taurus
LYSGLPAGLQRQISFASLRIGL

SEQ ID NO: 13996 - protein, 20 aa, Bos taurus
VHPLCMIIGLVFLQGDALLV

SEQ ID NO: 13997 - protein, 18 aa, Bos taurus
GLSAGLLRQATYTTTRLG

SEQ ID NO: 13998 - protein, 24 aa, Bos taurus
LANVIRYFPTQALNFAFKDKYKQI

SEQ ID NO: 13999 - protein, 17 aa, Bos taurus
NVKVSLAFGLSIATLAQ

SEQ ID NO: 14000 - protein, 18 aa, Bos taurus
VLQIAMAFGLAIGTLVQA

SEQ ID NO: 14001 - protein, 18 aa, Bos taurus
YWLAFDYLSDVVYLLDMF

SEQ ID NO: 14002 - protein, 21 aa, Bos taurus
FFIVETVCIVWFSFEFVVRCF

SEQ ID NO: 14003 - protein, 20 aa, Bos taurus
FIQAGLLSALGSLGLMIWLM

SEQ ID NO: 14004 - protein, 23 aa, Bos taurus
AAAVGLGLTLFTCGPHTLHSLVT

SEQ ID NO: 14005 - protein, 18 aa, Bos taurus
LWLLMDYLCDLIYLLDIT

SEQ ID NO: 14006 - protein, 20 aa, Bos taurus
ITHGLMAGVIITATVILVSA

SEQ ID NO: 14007 - protein, 17 aa, Bos taurus
PLKFFQTGALLEILHCA

SEQ ID NO: 14008 - protein, 20 aa, Bos taurus
AVLTAVGIVIAILAIITGEF

SEQ ID NO: 14009 - protein, 20 aa, Bos taurus
FTFYLIAFIAGTAVIVDKPW

SEQ ID NO: 14010 - protein, 20 aa, Bos taurus
WVLFWAYAFGSCVNHSMTLA

SEQ ID NO: 14011 - protein, 20 aa, Bos taurus
FDFFLAACEIIFCLFILYYV

SEQ ID NO: 14012 - protein, 20 aa, Bos taurus
VLFFLTTNQCFSSVSAVELL

SEQ ID NO: 14013 - protein, 20 aa, Bos taurus
FVFYLCCFVCGTMVLYHESW

SEQ ID NO: 14014 - protein, 24 aa, Bos taurus
LANVIRYFPTQALNFAFKDKYKQI

SEQ ID NO: 14015 - protein, 20 aa, Bos taurus
LIVALILRSIYYLGIGPTLN

SEQ ID NO: 14016 - protein, 20 aa, Bos taurus
HWSGLLWTAMLISLAIVIAL

SEQ ID NO: 14017 - protein, 20 aa, Bos taurus
VYFVKVAWAWTFCLLLPFIA

SEQ ID NO: 14018 - protein, 20 aa, Bos taurus
WHPVLMVTGMVVLYSAASLV

SEQ ID NO: 14019 - protein, 20 aa, Bos taurus
AAWTVQELPSLALPLLACAG

SEQ ID NO: 14020 - protein, 20 aa, Bos taurus
VLVVSSLSPLCVLLWRELTG

SEQ ID NO: 14021 - protein, 20 aa, Bos taurus
MGPALERIDYLLILWIIGMI

SEQ ID NO: 14022 - protein, 25 aa, Bos taurus
FLVSLAAADILVATLIIPFSLANEL

SEQ ID NO: 14023 - protein, 20 aa, Bos taurus
WTLMLMSLILFIGSTNLLGL

SEQ ID NO: 14024 - protein, 19 aa, Bos taurus
GWAPTFIGYSLQGLCKFGF

SEQ ID NO: 14025 - protein, 20 aa, Bos taurus
GDWLLLLETFAIFIFGAEFA

SEQ ID NO: 14026 - protein, 20 aa, Bos taurus
FIKFICHTASYLTFLFLLLL

SEQ ID NO: 14027 - protein, 18 aa, Bos taurus
VWLVLDYVSDVVYIADLF

SEQ ID NO: 14028 - protein, 20 aa, Bos taurus
GGFLTINLAFGFAVTLGILI

SEQ ID NO: 14029 - protein, 20 aa, Bos taurus
AAHLLADVGSMMGSLFSLWL

SEQ ID NO: 14030 - protein, 20 aa, Bos taurus
IGLVMQLCQSISLLELLHIY

SEQ ID NO: 14031 - protein, 16 aa, Bos taurus
VYYPQVHLGTISGAGV

SEQ ID NO: 14032 - protein, 19 aa, Bos taurus
AYLVPYLVLLIIIGIPLFF

SEQ ID NO: 14033 - protein, 24 aa, Bos taurus
LANVIRYFPTQALNFAFKDKYKQL

SEQ ID NO: 14034 - protein, 21 aa, Bos taurus
LAHVEAVCIAWFTMEYLLRFL

SEQ ID NO: 14035 - protein, 20 aa, Bos taurus
FPLAFFCMDTACVLIFTGEY

SEQ ID NO: 14036 - protein, 20 aa, Bos taurus
WHPVLMSLAFSFLMTEALLV

SEQ ID NO: 14037 - protein, 19 aa, Bos taurus
FLYLVNLYFLYQYSTRLET

SEQ ID NO: 14038 - protein, 20 aa, Bos taurus
PMFSILLWIAVAICTSMLFF

SEQ ID NO: 14039 - protein, 20 aa, Bos taurus
MIFRTEGLFGFYKGILPPIL

SEQ ID NO: 14040 - protein, 20 aa, Bos taurus
SFHMFFDSTAILAGLAASVI

SEQ ID NO: 14041 - protein, 19 aa, Bos taurus
GNGTNVIKIAPETAVKFWA

SEQ ID NO: 14042 - protein, 20 aa, Bos taurus
SAFGFAFDAILDVLSSAIVL

SEQ ID NO: 14043 - protein, 22 aa, Bos taurus
LYSGLVAGLQRQMSFASIRIGL

SEQ ID NO: 14044 - protein, 19 aa, Bos taurus
GLSSLLYGSIPKAAVRFGT

SEQ ID NO: 14045 - protein, 17 aa, Bos taurus
GAMMIRIFPYGAIQFMA

SEQ ID NO: 14046 - protein, 20 aa, Bos taurus
AFNFLLVWYYCTLTIRESIL

SEQ ID NO: 14047 - protein, 20 aa, Bos taurus
YFGMYRGAAVNLTLVTPEKA

SEQ ID NO: 14048 - protein, 20 aa, Bos taurus
GLGSPLLGLTFINALVFGVQ

SEQ ID NO: 14049 - protein, 20 aa, Bos taurus
ILEYVCISWFTGEFVLRFLC

SEQ ID NO: 14050 - protein, 19 aa, Bos taurus
GNGINVLKIAPESAIKFMA

SEQ ID NO: 14051 - protein, 20 aa, Bos taurus
YLTIFDLFSLITCLVSYWVM

SEQ ID NO: 14052 - protein, 20 aa, Bos taurus
TLWSGLPATLVMTVPATAAY

SEQ ID NO: 14053 - protein, 20 aa, Bos taurus
IIQAFLSMAVGALTGDALLH

SEQ ID NO: 14054 - protein, 22 aa, Bos taurus
LYSGLVAGLQRQMSFASVRIGL

SEQ ID NO: 14055 - protein, 20 aa, Bos taurus
KCLFGAMLNIAAVLCVATIY

SEQ ID NO: 14056 - protein, 26 aa, Bos taurus
GMSPSIVRCVPGVGIYFGTLYSLKQY

SEQ ID NO: 14057 - protein, 20 aa, Bos taurus
ALHMLTDLSAIILTLLALWL

SEQ ID NO: 14058 - protein, 20 aa, Bos taurus
SCVFSQVMNMAAFLALVVAV

SEQ ID NO: 14059 - protein, 20 aa, Bos taurus
FKLYLTIILLLGAVACRFFL

SEQ ID NO: 14060 - protein, 20 aa, Bos taurus
VYAGVPSTAIGSFPNAAAFF

SEQ ID NO: 14061 - protein, 20 aa, Bos taurus
SCIFSQVLNIGAASAAWICI

SEQ ID NO: 14062 - protein, 20 aa, Bos taurus
FSTYVCLVLLVANILRILFW

SEQ ID NO: 14063 - protein, 20 aa, Bos taurus
LWSGLPPTLVMAVPATVIYF

SEQ ID NO: 14064 - protein, 20 aa, Bos taurus
LVTFTHGILSIGLSAYIGFI

SEQ ID NO: 14065 - protein, 20 aa, Bos taurus
LLSIGYGAVQFLSFEALTEL

SEQ ID NO: 14066 - protein, 21 aa, Bos taurus
ILVPLVWDLGLLLLFVGQHSL

SEQ ID NO: 14067 - protein, 20 aa, Bos taurus
GMSFPLASIAVYNSVVFGVF

SEQ ID NO: 14068 - protein, 20 aa, Bos taurus
TYPRLYRGFVASVVAVVRAD

SEQ ID NO: 14069 - protein, 20 aa, Bos taurus
AGVTYLFVQLCKMLFLATFF

SEQ ID NO: 14070 - protein, 20 aa, Bos taurus
IIEAAIRTLFAVIGILVEQF

SEQ ID NO: 14071 - protein, 20 aa, Bos taurus
FYLWSPGFGAALPASYVAIL

SEQ ID NO: 14072 - protein, 20 aa, Bos taurus
VMITYNFSIVLFSVYMFYEF

SEQ ID NO: 14073 - protein, 19 aa, Bos taurus
VVYMLHLAAADVLFVCVLP

SEQ ID NO: 14074 - protein, 20 aa, Bos taurus
FIGLISVSNLFMGAYTGILT

SEQ ID NO: 14075 - protein, 20 aa, Bos taurus
FGLYGAFLASHLIIQSLFAF

SEQ ID NO: 14076 - protein, 20 aa, Bos taurus
TIHKNLCINLFIAEFIFLIG

SEQ ID NO: 14077 - protein, 20 aa, Bos taurus
TIHKNLCISLFVAELLFLIG

SEQ ID NO: 14078 - protein, 20 aa, Bos taurus
TIHKNLCINLFLAELLFLVG

SEQ ID NO: 14079 - protein, 25 aa, Bos taurus
TLLMIGLTTNMLTMYQWWRDVIRES

SEQ ID NO: 14080 - protein, 22 aa, Bos taurus
YILLNLAVADLFMVFGGFTTTL

SEQ ID NO: 14081 - protein, 23 aa, Bos taurus
IVNLAVADLLLTSTVLPFSAIFE

SEQ ID NO: 14082 - protein, 22 aa, Bos taurus
YLIVSLAVADLLVATLVMPWVV

SEQ ID NO: 14083 - protein, 19 aa, Bos taurus
NGPNALIASLALGDLIYVV

SEQ ID NO: 14084 - protein, 27 aa, Bos taurus
VASVFLLNLALADLCFLLTLPLWAVYT

SEQ ID NO: 14085 - protein, 21 aa, Bos taurus
LHLSVADLLFVLTLPFWAVDA

SEQ ID NO: 14086 - protein, 25 aa, Bos taurus
ILIASLALGDLLHIIIDIPINTYKL

SEQ ID NO: 14087 - protein, 20 aa, Bos taurus
NLYIVSLSVADLIVGVVVMP

SEQ ID NO: 14088 - protein, 19 aa, Bos taurus
SGKSQVLFAVVFTARYLDL

SEQ ID NO: 14089 - protein, 20 aa, Bos taurus
LSYLLLFSLLCCFSSSLFFI

SEQ ID NO: 14090 - protein, 20 aa, Bos taurus
YFLFSLACADLIIGVFSMNL

SEQ ID NO: 14091 - protein, 20 aa, Bos taurus
MYYFICCLAVSDLLVSVSNV

SEQ ID NO: 14092 - protein, 20 aa, Bos taurus
IGHLCLADLAVALFQVLPQL

SEQ ID NO: 14093 - protein, 24 aa, Bos taurus
IYIFNLALADALATSTLPFQSVNY

SEQ ID NO: 14094 - protein, 20 aa, Bos taurus
IVVSFLLLLAVLTATYYVEG

SEQ ID NO: 14095 - protein, 22 aa, Bos taurus
FLMCNLAFADFCMGLYLLLIAS

SEQ ID NO: 14096 - protein, 23 aa, Bos taurus
IYYLMANLAAADFFAGLAYFYLM

SEQ ID NO: 14097 - protein, 23 aa, Bos taurus
ITSLACADLVMGLAVVPFGACHI

SEQ ID NO: 14098 - protein, 20 aa, Bos taurus
VLVVLVFALSIGALVIYFID

SEQ ID NO: 14099 - protein, 25 aa, Bos taurus
FLVSLASADILVATLVIPFSLANEV

SEQ ID NO: 14100 - protein, 20 aa, Bos taurus
LLNLAISDLLFIITIPFWAH

SEQ ID NO: 14101 - protein, 28 aa, Bos taurus
PAVIYMANLALADLLSVTWFPLKIAYHI

SEQ ID NO: 14102 - protein, 20 aa, Bos taurus
ILVVYNLGLTLLSLYMFCEL

SEQ ID NO: 14103 - protein, 20 aa, Bos taurus
LIWCSSSPTIVSAFSCFGLW

SEQ ID NO: 14104 - protein, 21 aa, Bos taurus
FIGNLALSDLLAGVAYTANLL

SEQ ID NO: 14105 - protein, 20 aa, Bos taurus
FLLHLAVADALLVLTLPLWA

SEQ ID NO: 14106 - protein, 22 aa, Bos taurus
YFLMSLAIADMLLGFLVMPVST

SEQ ID NO: 14107 - protein, 26 aa, Bos taurus
FFVISLAVSDLLVAVLVMPWKAVAEI

SEQ ID NO: 14108 - protein, 20 aa, Bos taurus
HIHANLSCAVLVAQVLLLIS

SEQ ID NO: 14109 - protein, 20 aa, Bos taurus
IYLLNLALSDLLFVATLPFW

SEQ ID NO: 14110 - protein, 19 aa, Bos taurus
ITLHKNLFFSFVCNSVITI

SEQ ID NO: 14111 - protein, 20 aa, Bos taurus
FVVLNLMGFVAYSVFNIGLF

SEQ ID NO: 14112 - protein, 20 aa, Bos taurus
VWFLNLAVADFLFNVFLPVH

SEQ ID NO: 14113 - protein, 20 aa, Bos taurus
YFIVNLALADLCMAAFNAAF

SEQ ID NO: 14114 - protein, 20 aa, Bos taurus
MYFFICSLAISDMLGSLYKI

SEQ ID NO: 14115 - protein, 20 aa, Bos taurus
IGWLALTDMVGQLLTSPVVI

SEQ ID NO: 14116 - protein, 19 aa, Bos taurus
ILNLAVADLFLLFTLPFWA

SEQ ID NO: 14117 - protein, 22 aa, Bos taurus
FLMCNLAFADLCIGIYLLLIAS

SEQ ID NO: 14118 - protein, 20 aa, Bos taurus
YFLLSLACADLIIGVISMNL

SEQ ID NO: 14119 - protein, 18 aa, Bos taurus
NVFVTSLATADLVVGLLV

SEQ ID NO: 14120 - protein, 20 aa, Bos taurus
LLVLSLALADSGISLNALVA

SEQ ID NO: 14121 - protein, 21 aa, Bos taurus
VYMFNLALADFLYVLTLPALI

SEQ ID NO: 14122 - protein, 25 aa, Bos taurus
YILVNVSLGGFIYCIFSVFIVFITS

SEQ ID NO: 14123 - protein, 22 aa, Bos taurus
FFFMKHLSIADLVVAVFQVLPQ

SEQ ID NO: 14124 - protein, 24 aa, Bos taurus
LVTGLGVTDLLGTCFLSPAVFAAY

SEQ ID NO: 14125 - protein, 21 aa, Bos taurus
LSSWFTAMLHCFGGGILSCVL

SEQ ID NO: 14126 - protein, 20 aa, Bos taurus
VLASLALWDFLVLFFCLPVV

SEQ ID NO: 14127 - protein, 20 aa, Bos taurus
PGWYWASYAVFFATYLTLAC

SEQ ID NO: 14128 - protein, 23 aa, Bos taurus
YFLVSLAAADVAVGLFAIPFAVT

SEQ ID NO: 14129 - protein, 20 aa, Bos taurus
MHLFLSFMLRAVSIFVKDAV

SEQ ID NO: 14130 - protein, 17 aa, Bos taurus
ILFTTALPTRIAYYALG

SEQ ID NO: 14131 - protein, 20 aa, Bos taurus
ILIVNLSFSDLLVAIMCLPF

SEQ ID NO: 14132 - protein, 20 aa, Bos taurus
LLFIVPVYAFDSWLSLLLLG

SEQ ID NO: 14133 - protein, 20 aa, Bos taurus
VYLLNLAMADLLFAMTLPIW

SEQ ID NO: 14134 - protein, 20 aa, Bos taurus
FLMCNLSFADFCMGLYLLLI

SEQ ID NO: 14135 - protein, 18 aa, Bos taurus
FIHMNLFVSFMLRAISVF

SEQ ID NO: 14136 - protein, 23 aa, Bos taurus
IYIFNLALADALVTTTMPFQSTV

SEQ ID NO: 14137 - protein, 20 aa, Bos taurus
LALSDVLMCTACVPLTLAYA

SEQ ID NO: 14138 - protein, 19 aa, Bos taurus
TIFYTNLAIADFLFCVTLP

SEQ ID NO: 14139 - protein, 22 aa, Bos taurus
WLLTHLLWFANAHLLGWFSPTI

SEQ ID NO: 14140 - protein, 23 aa, Bos taurus
TLVCGLAVTDLLGTLLVSPVTIA

SEQ ID NO: 14141 - protein, 20 aa, Bos taurus
TVHLHLCICLFVGSAIFLAG

SEQ ID NO: 14142 - protein, 19 aa, Bos taurus
ALLLCLTWLGLQAALYLLP

SEQ ID NO: 14143 - protein, 20 aa, Bos taurus
LCGLVLTDFMGLLVTGAIVV

SEQ ID NO: 14144 - protein, 25 aa, Bos taurus
WILVNLAIADLAETIIASTISVVNQ

SEQ ID NO: 14145 - protein, 24 aa, Bos taurus
FICSLAVADMLVSVSNGSETIVIT

SEQ ID NO: 14146 - protein, 26 aa, Bos taurus
NLFIMSLASADLVMGLLVVPFGATIV

SEQ ID NO: 14147 - protein, 19 aa, Bos taurus
FMVNLTMADLLFLVTLPLW

SEQ ID NO: 14148 - protein, 20 aa, Bos taurus
VHGALMFVAWMTTVSVGVLI

SEQ ID NO: 14149 - protein, 20 aa, Bos taurus
ASWLCAMLHCFGSYILADLL

SEQ ID NO: 14150 - protein, 20 aa, Bos taurus
SVFYVLVFGLTITDLLGKCL

SEQ ID NO: 14151 - protein, 20 aa, Bos taurus
LFVGVSCLVPTLSLLHYSTG

SEQ ID NO: 14152 - protein, 19 aa, Bos taurus
YVLEAAVYTFTMFFSTFYH

SEQ ID NO: 14153 - protein, 20 aa, Bos taurus
LWLSLFLHAGVLHCLVSVCF

SEQ ID NO: 14154 - protein, 20 aa, Bos taurus
LYHAWLAAVVIFGPLLQFHV

SEQ ID NO: 14155 - protein, 20 aa, Bos taurus
YPTCVAFAWVSLNAWFWSTV

SEQ ID NO: 14156 - protein, 19 aa, Bos taurus
DHMVSLACSDILVFLIGMP

SEQ ID NO: 14157 - protein, 20 aa, Bos taurus
LILLETILFGSLLLYFPVVI

SEQ ID NO: 14158 - protein, 20 aa, Bos taurus
MVRYVILFCHFLNFAGTGFF

SEQ ID NO: 14159 - protein, 20 aa, Bos taurus
LLIGLIAAVNMLMGVSSAVL

SEQ ID NO: 14160 - protein, 20 aa, Bos taurus
IYILNLAVADVLLMLGLPFV

SEQ ID NO: 14161 - protein, 20 aa, Bos taurus
VYLCNLTVADLFYICSLPFW

SEQ ID NO: 14162 - protein, 22 aa, Bos taurus
FIVSLAVADVAVGALVIPLAIL

SEQ ID NO: 14163 - protein, 19 aa, Bos taurus
LLLKHLTLANLLETLIVMP

SEQ ID NO: 14164 - protein, 24 aa, Bos taurus
NIYILNLAIADELFMLGLPFLAMQ

SEQ ID NO: 14165 - protein, 25 aa, Bos taurus
VYVINLALADLLYLLSIPFIVATYV

SEQ ID NO: 14166 - protein, 23 aa, Bos taurus
FVGSLAVADMLVSLSNSWETITI

SEQ ID NO: 14167 - protein, 20 aa, Bos taurus
FFIANLAVADLLVNTLCLPF

SEQ ID NO: 14168 - protein, 21 aa, Bos taurus
VTNAFLLSLAVSDLLLAVACM

SEQ ID NO: 14169 - protein, 20 aa, Bos taurus
CFKAVLFLTGLLFGSVVIFL

SEQ ID NO: 14170 - protein, 22 aa, Bos taurus
YFIVNLSLADVLVTAICLPASL

SEQ ID NO: 14171 - protein, 20 aa, Bos taurus
FLNLALSNLGFLLTLPFWAY

SEQ ID NO: 14172 - protein, 23 aa, Bos taurus
YFIVSLALADIAVGVLVMPLAIV

SEQ ID NO: 14173 - protein, 20 aa, Bos taurus
IHWLMAALTFTKSVSLLFHS

SEQ ID NO: 14174 - protein, 20 aa, Bos taurus
VFLALCLLWAALRTTLFSFY

SEQ ID NO: 14175 - protein, 20 aa, Bos taurus
VYLMNLSIADLLYICTLPLW

SEQ ID NO: 14176 - protein, 19 aa, Bos taurus
TVTGIIAANVFVFCLWRVP

SEQ ID NO: 14177 - protein, 20 aa, Bos taurus
LIANLTVADLLYCTLLQPFS

SEQ ID NO: 14178 - protein, 19 aa, Bos taurus
SGKSQLLFALVFTTRYLDL

SEQ ID NO: 14179 - protein, 20 aa, Bos taurus
LGFAAGVMLAASYWSLLAPA

SEQ ID NO: 14180 - protein, 20 aa, Bos taurus
LLGTQVFFLLGTLGLFCLVF

SEQ ID NO: 14181 - protein, 20 aa, Bos taurus
FVFSLTLSNFLLSVLVLPFV

SEQ ID NO: 14182 - protein, 20 aa, Bos taurus
VWTYYVSYAIFFVSLIVLSC

SEQ ID NO: 14183 - protein, 20 aa, Bos taurus
FIVYLKNIVIADFLMSLTFP

SEQ ID NO: 14184 - protein, 20 aa, Bos taurus
VTVYMMNVALLDLVFIMSLP

SEQ ID NO: 14185 - protein, 20 aa, Bos taurus
WVNVLLKILPVLYLAGFLGT

SEQ ID NO: 14186 - protein, 20 aa, Bos taurus
LMVLHLALADLAVLLTAPFF

SEQ ID NO: 14187 - protein, 20 aa, Bos taurus
VSIYLINLLTADFLLTLALP

SEQ ID NO: 14188 - protein, 20 aa, Bos taurus
VVSVYMCNLAASDLLFTLSL

SEQ ID NO: 14189 - protein, 20 aa, Bos taurus
YLFSLAVSDLLVLLLGMPLE

SEQ ID NO: 14190 - protein, 20 aa, Bos taurus
LNELFGKFLFISFDLFTAFL

SEQ ID NO: 14191 - protein, 20 aa, Bos taurus
YLLNLALADILFLLTLPFWA

SEQ ID NO: 14192 - protein, 20 aa, Bos taurus
FFLSLLLAGLLTGLALPALP

SEQ ID NO: 14193 - protein, 22 aa, Bos taurus
HVFILNLAIADGLFTLVLPTNI

SEQ ID NO: 14194 - protein, 24 aa, Bos taurus
NLFILNLAVADELFTLVPPVNIAD

SEQ ID NO: 14195 - protein, 20 aa, Bos taurus
LLIANLAISDFLVAIICCPF

SEQ ID NO: 14196 - protein, 20 aa, Bos taurus
LLIANLAISDFLVAIVCCPF

SEQ ID NO: 14197 - protein, 20 aa, Bos taurus
RSTLVQLAVGSALFSIVVPI

SEQ ID NO: 14198 - protein, 20 aa, Bos taurus
ILFIVPIYAFDSWLSLLFFT

SEQ ID NO: 14199 - protein, 21 aa, Bos taurus
CYLVSLAVADLMVLVAAGLPN

SEQ ID NO: 14200 - protein, 20 aa, Bos taurus
ASALVITDFFGHLINGTIAV

SEQ ID NO: 14201 - protein, 20 aa, Bos taurus
WAVFAPIWLWKLLVLAGASV

SEQ ID NO: 14202 - protein, 20 aa, Bos taurus
AFAMLATLLSATAAVIYPLY

SEQ ID NO: 14203 - protein, 20 aa, Bos taurus
AWFIAGIFLLLTIPISLWVI

SEQ ID NO: 14204 - protein, 20 aa, Bos taurus
LLWMLTLGGGGLGWLWEFWM

SEQ ID NO: 14205 - protein, 20 aa, Bos taurus
CLPIFCLWLFLLAHGLGFLL

SEQ ID NO: 14206 - protein, 20 aa, Bos taurus
FLLDLCLADGIRSAVCFPFV

SEQ ID NO: 14207 - protein, 20 aa, Bos taurus
FLAMPFNSLVNMAYVFLGVY

SEQ ID NO: 14208 - protein, 21 aa, Bos taurus
VLSSDIIILTITRCIAILYIY

SEQ ID NO: 14209 - protein, 21 aa, Bos taurus
WIIRYMHANGASMFFICLYMH

SEQ ID NO: 14210 - protein, 20 aa, Bos taurus
MFILAPIMALGLALTMWIPL

SEQ ID NO: 14211 - protein, 21 aa, Bos taurus
LLMRMLQMLVLPLIISSLVTG

SEQ ID NO: 14212 - protein, 20 aa, Bos taurus
NSIMSNPLAGMVIGVLVTVL

SEQ ID NO: 14213 - protein, 16 aa, Bos taurus
LGHGILMTLFAVWMVL

SEQ ID NO: 14214 - protein, 20 aa, Bos taurus
PWCALNGCVGTVVSTLTALL

SEQ ID NO: 14215 - protein, 20 aa, Bos taurus
MLKLVILPLIVSSMITGVAT

SEQ ID NO: 14216 - protein, 20 aa, Bos taurus
VLNTLIMISVIVTMTIFLVV

SEQ ID NO: 14217 - protein, 20 aa, Bos taurus
IGIAELIPLVTTYIILFAYI

SEQ ID NO: 14218 - protein, 16 aa, Bos taurus
FGHGFVMFLFALLLVL

SEQ ID NO: 14219 - protein, 20 aa, Bos taurus
PYWTYLLCALGLFIYQSLDA

SEQ ID NO: 14220 - protein, 21 aa, Bos taurus
LLLRLLKMIILPLVVCSLIGG

SEQ ID NO: 14221 - protein, 20 aa, Bos taurus
PFMKFVAHAASFTIFLGLLV

SEQ ID NO: 14222 - protein, 20 aa, Bos taurus
FPSSLCVGLGQMVATVAVLW

SEQ ID NO: 14223 - protein, 20 aa, Bos taurus
FWFFKIAAIVGVMVGSFYIP

SEQ ID NO: 14224 - protein, 20 aa, Bos taurus
ICSLLGSLMVGLSGVFPLLV

SEQ ID NO: 14225 - protein, 20 aa, Bos taurus
GATVFFAVFMAVWATVFLEF

SEQ ID NO: 14226 - protein, 22 aa, Bos taurus
VTFYQCLVTVLLCKGLSSLATC

SEQ ID NO: 14227 - protein, 20 aa, Bos taurus
IFVWLLLLYLMQVIALVLYF

SEQ ID NO: 14228 - protein, 20 aa, Bos taurus
STVAVTLLTLGSMLGTTLIL

SEQ ID NO: 14229 - protein, 20 aa, Bos taurus
WYMLSLFGTGAVLMRGAGCT

SEQ ID NO: 14230 - protein, 20 aa, Bos taurus
LSLVSCFAGGVFLATCLLDL

SEQ ID NO: 14231 - protein, 20 aa, Bos taurus
ILSLCNTFGGGVFLATCFNA

SEQ ID NO: 14232 - protein, 20 aa, Bos taurus
LSSTAVVVAELLKIMACILL

SEQ ID NO: 14233 - protein, 20 aa, Bos taurus
FALTLVFIQCVVNAVFAKIL

SEQ ID NO: 14234 - protein, 20 aa, Bos taurus
PIYGLYTSFFASLIYFILGT

SEQ ID NO: 14235 - protein, 20 aa, Bos taurus
TVFFYMLVAIIIHAIIQEYV

SEQ ID NO: 14236 - protein, 20 aa, Bos taurus
DTVLGLCILAFALSLAMMFT

SEQ ID NO: 14237 - protein, 20 aa, Bos taurus
AVLLTELTKLLLCALSLLVG

SEQ ID NO: 14238 - protein, 17 aa, Bos taurus
MWGRLVGLAYILPAAYF

SEQ ID NO: 14239 - protein, 20 aa, Bos taurus
ALALGLIITCSSPGGGGSYL

SEQ ID NO: 14240 - protein, 20 aa, Bos taurus
TSLNFHLIDYHLAAFITVML

SEQ ID NO: 14241 - protein, 20 aa, Bos taurus
TSLNFHLIDFNLLMVTTIVL

SEQ ID NO: 14242 - protein, 20 aa, Bos taurus
VPYLYFDMGAAVLCASFMSF

SEQ ID NO: 14243 - protein, 20 aa, Bos taurus
MIILPLVVCSLVSGAASLDA

SEQ ID NO: 14244 - protein, 20 aa, Bos taurus
IAVGMLCQFGLMPLIAYLLI

SEQ ID NO: 14245 - protein, 20 aa, Bos taurus
TVPAAVFMVLFSSLCLLLPT

SEQ ID NO: 14246 - protein, 20 aa, Bos taurus
LLWVAVIGDWLNLVFKWILF

SEQ ID NO: 14247 - protein, 25 aa, Bos taurus
WPALCLVIVANIFAVAAFQVEKRLA

SEQ ID NO: 14248 - protein, 20 aa, Bos taurus
ILNAVIMISVIVIMTILLVV

SEQ ID NO: 14249 - protein, 20 aa, Bos taurus
IFSLAIALITSALLPVDIFL

SEQ ID NO: 14250 - protein, 20 aa, Bos taurus
VLGVGAQFLALGTGIIVMAL

SEQ ID NO: 14251 - protein, 20 aa, Bos taurus
LLGSGIQLFCMILIVIFVAM

SEQ ID NO: 14252 - protein, 20 aa, Bos taurus
IAVLWISLITEWLNLVFKWF

SEQ ID NO: 14253 - protein, 20 aa, Bos taurus
VHLLIWIPRLAQALLSAIAD

SEQ ID NO: 14254 - protein, 20 aa, Bos taurus
ILSVIFFFLIISVLAFPNGP

SEQ ID NO: 14255 - protein, 20 aa, Bos taurus
VTFAFSCTMFELIIFEILGV

SEQ ID NO: 14256 - protein, 20 aa, Bos taurus
TIVGAAAVVLLLVALLARVL

SEQ ID NO: 14257 - protein, 20 aa, Bos taurus
WLWWAGLLSMGAGEVANFAA

SEQ ID NO: 14258 - protein, 20 aa, Bos taurus
LGVVLAAVVIVTGCFSYYQE

SEQ ID NO: 14259 - protein, 20 aa, Bos taurus
TLVPLIIILTIAGIKEIVED

SEQ ID NO: 14260 - protein, 20 aa, Bos taurus
GWIEGAAILFSVIIVVLVTA

SEQ ID NO: 14261 - protein, 20 aa, Bos taurus
LTLMALGSSAPEILLSVIEV

SEQ ID NO: 14262 - protein, 18 aa, Bos taurus
SITVAILIVVTVAFVQEY

SEQ ID NO: 14263 - protein, 20 aa, Bos taurus
LGVVLSAVVIITGCFSYYQE

SEQ ID NO: 14264 - protein, 20 aa, Bos taurus
EPFVILLILIANAIVGVWQE

SEQ ID NO: 14265 - protein, 22 aa, Bos taurus
VSPTGRYTTLVPLLFILAVAAI

SEQ ID NO: 14266 - protein, 20 aa, Bos taurus
YNFGTQLYHSLLCIVLQFLI

SEQ ID NO: 14267 - protein, 20 aa, Bos taurus
LKIGYLYTYWAPLGFVLAVT

SEQ ID NO: 14268 - protein, 20 aa, Bos taurus
YWILIALGLALVLSLLFILL

SEQ ID NO: 14269 - protein, 20 aa, Bos taurus
WFNFGMVFGVIAMFSSFFLL

SEQ ID NO: 14270 - protein, 23 aa, Bos taurus
FSLLLWAALNAAFVLLGSTIVAF

SEQ ID NO: 14271 - protein, 19 aa, Bos taurus
GVISGAVFLIILFCFIPFP

SEQ ID NO: 14272 - protein, 20 aa, Bos taurus
YWIIIGLIIAMVLSLLFIIL

SEQ ID NO: 14273 - protein, 20 aa, Bos taurus
VNVCSELVKLVFCALVSFWV

SEQ ID NO: 14274 - protein, 19 aa, Bos taurus
HVPDWVWIVVGILNFMAYT

SEQ ID NO: 14275 - protein, 19 aa, Bos taurus
MELGISPIVTSGLIMQLLA

SEQ ID NO: 14276 - protein, 20 aa, Bos taurus
SLLTLFTPLTADFGVILVIV

SEQ ID NO: 14277 - protein, 20 aa, Bos taurus
AVYRLCFGLAMFYLLLSLLM

SEQ ID NO: 14278 - protein, 19 aa, Bos taurus
MELGISPIVTSGLIMQLLA

SEQ ID NO: 14279 - protein, 20 aa, Bos taurus
GFPNMSLTLVHFVVTWLGLY

SEQ ID NO: 14280 - protein, 20 aa, Bos taurus
FFSTFAKTSMFVLYLLGFIV

SEQ ID NO: 14281 - protein, 20 aa, Bos taurus
FLQWVLCAAIWLVALVVNLI

SEQ ID NO: 14282 - protein, 20 aa, Bos taurus
YISLAVLVVQNASLILSIRY

SEQ ID NO: 14283 - protein, 20 aa, Bos taurus
HWLLVWIGFEMNMLAIIPIM

SEQ ID NO: 14284 - protein, 20 aa, Bos taurus
TFMAAGGSAPELFTSLIGVF

SEQ ID NO: 14285 - protein, 20 aa, Bos taurus
LFIILLTFVSIFSLYSVHLL

SEQ ID NO: 14286 - protein, 20 aa, Bos taurus
LIPPLNVSYAAFCASVIYGI

SEQ ID NO: 14287 - protein, 20 aa, Bos taurus
IALLSSYSIHLLLTCAGVVG

SEQ ID NO: 14288 - protein, 20 aa, Bos taurus
YLAVASTVPSVLCLALNFLL

SEQ ID NO: 14289 - protein, 20 aa, Bos taurus
TAQGLELLSLLGTVLALGAL

SEQ ID NO: 14290 - protein, 20 aa, Bos taurus
VAAGITLQMAMLVFIISGLV

SEQ ID NO: 14291 - protein, 19 aa, Bos taurus
LLFQRFSVIFTDALFVYAV

SEQ ID NO: 14292 - protein, 20 aa, Bos taurus
LIFTLASFTINFMTFPTGYI

SEQ ID NO: 14293 - protein, 20 aa, Bos taurus
GIVLLTLGLVGPCGVGGAAA

SEQ ID NO: 14294 - protein, 20 aa, Bos taurus
GLPPQYGLYSAFMGCFVYFF

SEQ ID NO: 14295 - protein, 20 aa, Bos taurus
LTVIIQLANVGPLLVTLLHH

SEQ ID NO: 14296 - protein, 20 aa, Bos taurus
ALSTLYGGMLLSSMFLPPVL

SEQ ID NO: 14297 - protein, 22 aa, Bos taurus
FPLILSSVGALANSAWLCLLSY

SEQ ID NO: 14298 - protein, 20 aa, Bos taurus
VLFGGLIGSVFSLLQFLSAP

SEQ ID NO: 14299 - protein, 20 aa, Bos taurus
FWVGETVFLLWNSLNDPLFG

SEQ ID NO: 14300 - protein, 20 aa, Bos taurus
FFTVFLFLGVLVCVIMLSPG

SEQ ID NO: 14301 - protein, 20 aa, Bos taurus
LGILLLFWVSYVTDFSLILL

SEQ ID NO: 14302 - protein, 20 aa, Bos taurus
GLIHGSFFWGYIVTQIPGGF

SEQ ID NO: 14303 - protein, 20 aa, Bos taurus
MIHGSFFWGYIITQIPGGYI

SEQ ID NO: 14304 - protein, 20 aa, Bos taurus
QALLLFMGLTYLVSPFGGWL

SEQ ID NO: 14305 - protein, 35 aa, Bos taurus
DQIYNVVVTAHAFVMIFFMVMPIMIGGFGNWLVPL

SEQ ID NO: 14306 - protein, 20 aa, Bos taurus
PGLAKGSHPVHCVLFLALLV

SEQ ID NO: 14307 - protein, 20 aa, Bos taurus
LSVAIFSVGGMIGSFSVGLF

SEQ ID NO: 14308 - protein, 19 aa, Bos taurus
AFLVPYLFFMVVAGVPLFY

SEQ ID NO: 14309 - protein, 23 aa, Bos taurus
LGIGLCLLFIVRTLLLHPAIFGL

SEQ ID NO: 14310 - protein, 20 aa, Bos taurus
LSVSSFAVGGMIASFFGGLL

SEQ ID NO: 14311 - protein, 22 aa, Bos taurus
LLWSVTVSMFPFGGFLGSLMVG

SEQ ID NO: 14312 - protein, 20 aa, Bos taurus
WFGAIVTLGAAAGGVLGGWL

SEQ ID NO: 14313 - protein, 25 aa, Bos taurus
SHWTLYMNVGGFLVGLFSSTLLGAW

SEQ ID NO: 14314 - protein, 20 aa, Bos taurus
ALSVAIFSVGGMISSFLIGI

SEQ ID NO: 14315 - protein, 22 aa, Bos taurus
IALWILLACLMKIGFHVIPTIS

SEQ ID NO: 14316 - protein, 20 aa, Bos taurus
RAVLGTAFFTLAMFVLLYAL

SEQ ID NO: 14317 - protein, 20 aa, Bos taurus
ISAIESLFGASMTGIAYSLF

SEQ ID NO: 14318 - protein, 18 aa, Bos taurus
LESFLGTAVSGAIFCLFA

SEQ ID NO: 14319 - protein, 19 aa, Bos taurus
AFLIPYFIFLFGGGLPVFF

SEQ ID NO: 14320 - protein, 19 aa, Bos taurus
AFLLPYTIMAIFGGIPLFY

SEQ ID NO: 14321 - protein, 20 aa, Bos taurus
GAFFIPYLIFLFTCGIPVFL

SEQ ID NO: 14322 - protein, 20 aa, Bos taurus
LFQSCVNLGFFLGSLGVGYI

SEQ ID NO: 14323 - protein, 23 aa, Bos taurus
AFLIPYTLFLIIAGMPLFYMELA

SEQ ID NO: 14324 - protein, 20 aa, Bos taurus
LSVAIFSVGGMIGSFSVGLF

SEQ ID NO: 14325 - protein, 20 aa, Bos taurus
QVGLLFASKATVQLLTNPFI

SEQ ID NO: 14326 - protein, 19 aa, Bos taurus
AFMFPYFIMLIFCGIPLFF

SEQ ID NO: 14327 - protein, 20 aa, Bos taurus
MLGLIVYLGMMVGAFLWGGL

SEQ ID NO: 14328 - protein, 20 aa, Bos taurus
MVVSSLLIGALLASLIGGVL

SEQ ID NO: 14329 - protein, 20 aa, Bos taurus
LAQSLYMMGVLLGAMTFGCL

SEQ ID NO: 14330 - protein, 20 aa, Bos taurus
VIASSFEIGNLALILFVSYF

SEQ ID NO: 14331 - protein, 20 aa, Bos taurus
PSFQDVHAMIFVGFGFLMVF

SEQ ID NO: 14332 - protein, 19 aa, Bos taurus
AYLLPYLILLLVIGIPLFF

SEQ ID NO: 14333 - protein, 20 aa, Bos taurus
ACILASIFETTGSVLLGAKV

SEQ ID NO: 14334 - protein, 20 aa, Bos taurus
GVFLIPYILIALIGGIPIFF

SEQ ID NO: 14335 - protein, 18 aa, Bos taurus
YFLAGRSMTWVAIGASLF

SEQ ID NO: 14336 - protein, 20 aa, Bos taurus
LAFTVGSFLLSAITLPLGIV

SEQ ID NO: 14337 - protein, 20 aa, Bos taurus
LIQPTFMFGVLLGAVIFGYL

SEQ ID NO: 14338 - protein, 20 aa, Bos taurus
VSWIASIGIAVQQFGSPVGS

SEQ ID NO: 14339 - protein, 20 aa, Bos taurus
ALLTSVVFVGMMSSSTLWGN

SEQ ID NO: 14340 - protein, 20 aa, Bos taurus
LLYAWYSWPNVVLCFFGGFL

SEQ ID NO: 14341 - protein, 18 aa, Bos taurus
SSFVLLEYLVAIILGAGL

SEQ ID NO: 14342 - protein, 19 aa, Bos taurus
AVAGFKLLWVLLWATVLGL

SEQ ID NO: 14343 - protein, 20 aa, Bos taurus
LKSMAKFLFMAGMLVGSIVY

SEQ ID NO: 14344 - protein, 20 aa, Bos taurus
PSFQDVHVMIFVGFGFLMTF

SEQ ID NO: 14345 - protein, 22 aa, Bos taurus
IAVYLMTFLIVTVAWAAHTRLF

SEQ ID NO: 14346 - protein, 20 aa, Bos taurus
WISSIMLAVMYGGGPISSVL

SEQ ID NO: 14347 - protein, 20 aa, Bos taurus
GAVDNAFLVAYAIGMFISGI

SEQ ID NO: 14348 - protein, 20 aa, Bos taurus
FFQDVHIMVFAGFGFLMTFL

SEQ ID NO: 14349 - protein, 20 aa, Bos taurus
LILVIFILGLFVLGIASILY

SEQ ID NO: 14350 - protein, 20 aa, Bos taurus
GLIQGVKGLLSFLSAPLIGA

SEQ ID NO: 14351 - protein, 20 aa, Bos taurus
AISTFFFAGVLVGAEVYGYL

SEQ ID NO: 14352 - protein, 20 aa, Bos taurus
GLIQTVFISSYMVLAPVFGY

SEQ ID NO: 14353 - protein, 20 aa, Bos taurus
LDFYQVYFLALAADWLQAPY

SEQ ID NO: 14354 - protein, 20 aa, Bos taurus
TLFLGMLDTIFLFSYAVGLF

SEQ ID NO: 14355 - protein, 20 aa, Bos taurus
FMIILNRCFPIFMVLAWIYS

SEQ ID NO: 14356 - protein, 20 aa, Bos taurus
SLSTPLLILTMWLLPLMLMA

SEQ ID NO: 14357 - protein, 18 aa, Bos taurus
APLFSSFTTIVTYHLTKE

SEQ ID NO: 14358 - protein, 20 aa, Bos taurus
MSFGPVALSLTASFMSAVTV

SEQ ID NO: 14359 - protein, 20 aa, Bos taurus
MVTTFGLAGIVGYHTVWGVT

SEQ ID NO: 14360 - protein, 20 aa, Bos taurus
GYFLAGGNMLWWPVGASLFA

SEQ ID NO: 14361 - protein, 20 aa, Bos taurus
SGLFIGLAGSGAAGGLAVAG

SEQ ID NO: 14362 - protein, 20 aa, Bos taurus
AFITSMIPTMMFIHSGQELI

SEQ ID NO: 14363 - protein, 20 aa, Bos taurus
AGPGVIVSFIIAAVASILSG

SEQ ID NO: 14364 - protein, 20 aa, Bos taurus
MSANSGLLPASVVMPLLGLV

SEQ ID NO: 14365 - protein, 20 aa, Bos taurus
IVLAALLLPICFADYGVEAL

SEQ ID NO: 14366 - protein, 20 aa, Bos taurus
TALGFLLWIVCWADLFYSFW

SEQ ID NO: 14367 - protein, 8 aa, Bos taurus
LEFTSSGS

SEQ ID NO: 14368 - protein, 8 aa, Bos taurus
VEFSTSGS

SEQ ID NO: 14369 - protein, 8 aa, Bos taurus
VEFSTSGH

SEQ ID NO: 14370 - protein, 19 aa, Bos taurus
YMLFTMVFVIASIIITVIV

SEQ ID NO: 14371 - protein, 21 aa, Bos taurus
YLIFVMVVATLIVMNCVIVLN

SEQ ID NO: 14372 - protein, 26 aa, Bos taurus
FVGITYALTVVWLLVFACSAVPVYIY

SEQ ID NO: 14373 - protein, 21 aa, Bos taurus
YLMFTMVLVTFSVILSVVVLN

SEQ ID NO: 14374 - protein, 21 aa, Bos taurus
FLLFGMVLVTMVVVICVIVLN

SEQ ID NO: 14375 - protein, 21 aa, Bos taurus
MDWFIAVCYAFVFSALIEFAT

SEQ ID NO: 14376 - protein, 22 aa, Bos taurus
AIDIYLMGCFVFVFLALLEYAF

SEQ ID NO: 14377 - protein, 20 aa, Bos taurus
GCFVFVFMALLEYALVNYIF

SEQ ID NO: 14378 - protein, 21 aa, Bos taurus
YLTFLLVVTILIVVNAVVVLN

SEQ ID NO: 14379 - protein, 20 aa, Bos taurus
LAVCVLFNVVLFLVALCCFL

SEQ ID NO: 14380 - protein, 20 aa, Bos taurus
IISILFKSVFEVAFLLIQWY

SEQ ID NO: 14381 - protein, 22 aa, Bos taurus
AMDWFIAVCFAFVFSALIEFAA

SEQ ID NO: 14382 - protein, 20 aa, Bos taurus
FSAGIMFFASTFFVLLALAI

SEQ ID NO: 14383 - protein, 23 aa, Bos taurus
GPMLDFLATAVFAFMWLVSSSAW

SEQ ID NO: 14384 - protein, 22 aa, Bos taurus
AMDLFVSVCFIFVFSALVEYGT

SEQ ID NO: 14385 - protein, 23 aa, Bos taurus
MLGLFFSFLLVIFAIEVAAAIWG

SEQ ID NO: 14386 - protein, 20 aa, Bos taurus
MILTYLILMLIIYIFECASC

SEQ ID NO: 14387 - protein, 20 aa, Bos taurus
ILLVYFILMFIVYAFEVASC

SEQ ID NO: 14388 - protein, 20 aa, Bos taurus
IIFKTLFEVGFIAGQYFLYG

SEQ ID NO: 14389 - protein, 22 aa, Bos taurus
LLVAGTAGGGGLLVLALGLALA

SEQ ID NO: 14390 - protein, 21 aa, Bos taurus
YFASTMIIVGLSVVVTVIVLQ

SEQ ID NO: 14391 - protein, 20 aa, Bos taurus
AIDIWMAVCLLFVFSALLEY

SEQ ID NO: 14392 - protein, 22 aa, Bos taurus
EYLLFTMIFVTLSIVITVFVLN

SEQ ID NO: 14393 - protein, 22 aa, Bos taurus
AMDWFIAVCYAFVFSALIEFAT

SEQ ID NO: 14394 - protein, 20 aa, Bos taurus
IYLWVSFVFVFLSVLEYAAV

SEQ ID NO: 14395 - protein, 20 aa, Bos taurus
VHAVLLGVVTVSCFFFIPAA

SEQ ID NO: 14396 - protein, 20 aa, Bos taurus
FFLLFLFYSLLYCLFVATTV

SEQ ID NO: 14397 - protein, 20 aa, Bos taurus
FTLFLLLAPLGCIHAAFIFV

SEQ ID NO: 14398 - protein, 20 aa, Bos taurus
LIQANVCSTFIPVYCGLIPP

SEQ ID NO: 14399 - protein, 14 aa, Bos taurus
SMRCGALLLLSCYF

SEQ ID NO: 14400 - protein, 20 aa, Bos taurus
FHEGAAALCGLVYLFARLRY

SEQ ID NO: 14401 - protein, 20 aa, Bos taurus
FVLTSIIQLMACLCVMIAAS

SEQ ID NO: 14402 - protein, 25 aa, Bos taurus
LLTLLAKNCAFFAGSILAVLIALTI

SEQ ID NO: 14403 - protein, 22 aa, Bos taurus
LLGTFFTCLVILFACEVAAGIW

SEQ ID NO: 14404 - protein, 20 aa, Bos taurus
LVLAIPLRVLVVLWAFILGL

SEQ ID NO: 14405 - protein, 20 aa, Bos taurus
ITIVAGVLFLLAALLTLVPV

SEQ ID NO: 14406 - protein, 23 aa, Bos taurus
PFVARMHFLVFFLGRMVHTVAYL

SEQ ID NO: 14407 - protein, 20 aa, Bos taurus
ALDVWLIACLLFGFASLVEY

SEQ ID NO: 14408 - protein, 20 aa, Bos taurus
LFLQLCFYTELLTCYALMFS

SEQ ID NO: 14409 - protein, 20 aa, Bos taurus
YFFLIGPPLLIPLYFQYQII

SEQ ID NO: 14410 - protein, 20 aa, Bos taurus
VLKVIKFLIIIAYNSALVSK

SEQ ID NO: 14411 - protein, 20 aa, Bos taurus
FFLFLLSLTAHITGVFGFGL

SEQ ID NO: 14412 - protein, 22 aa, Bos taurus
LWWTYVISVVFRLLFEAAFMYV

SEQ ID NO: 14413 - protein, 21 aa, Bos taurus
MDWFIAVCYAFVFSALIEFAT

SEQ ID NO: 14414 - protein, 21 aa, Bos taurus
MDWFMAVCYAFVFSALIEFAT

SEQ ID NO: 14415 - protein, 21 aa, Bos taurus
LGAGLSVGLSGLAAGFAIGIV

SEQ ID NO: 14416 - protein, 20 aa, Bos taurus
ILSAGIFFVSAGLSNIIGII

SEQ ID NO: 14417 - protein, 20 aa, Bos taurus
AWFIMLTYLFMLAWLGVTAF

SEQ ID NO: 14418 - protein, 20 aa, Bos taurus
ALYALCGLLALVPLCWFANI

SEQ ID NO: 14419 - protein, 20 aa, Bos taurus
ITVVLMCFVVPTLVPWYIWG

SEQ ID NO: 14420 - protein, 20 aa, Bos taurus
PLLVLLLSFPSIMVPLARIL

SEQ ID NO: 14421 - protein, 20 aa, Bos taurus
FVAESHIILVLNAAITMGMD

SEQ ID NO: 14422 - protein, 20 aa, Bos taurus
AIIYSVHTMTTLIPILSTLL

SEQ ID NO: 14423 - protein, 20 aa, Bos taurus
ILCGALVFPTIATIVGKLMF

SEQ ID NO: 14424 - protein, 20 aa, Bos taurus
YFFSFCFFMTLGCVYCSYGS

SEQ ID NO: 14425 - protein, 20 aa, Bos taurus
FYLFILSLSLLTIYVFAFNI

SEQ ID NO: 14426 - protein, 20 aa, Bos taurus
KKQYPTAFVMVVMLASYFLI

SEQ ID NO: 14427 - protein, 20 aa, Bos taurus
TLVNWLFWASMLLYPFFRFV

SEQ ID NO: 14428 - protein, 22 aa, Bos taurus
AIDVYLGICFSFVFGALLEYAV

SEQ ID NO: 14429 - protein, 18 aa, Bos taurus
VLLRLSCLVSLAGSVYLA

SEQ ID NO: 14430 - protein, 20 aa, Bos taurus
MIVAGVVFLLAGLLVMVPVS

SEQ ID NO: 14431 - protein, 20 aa, Bos taurus
AVFGGVIFLISGLAILVATA

SEQ ID NO: 14432 - protein, 20 aa, Bos taurus
WIIPFFCYQIFDFALNTLVA

SEQ ID NO: 14433 - protein, 20 aa, Bos taurus
LVFTMIFVTLSIMVTVFAIN

SEQ ID NO: 14434 - protein, 19 aa, Bos taurus
YKPGVLLLCFILPTLVPWY

SEQ ID NO: 14435 - protein, 20 aa, Bos taurus
LMITFAIFLSLIMLVEVAAA

SEQ ID NO: 14436 - protein, 20 aa, Bos taurus
FAYHFTVFVFYFGAFLLEAA

SEQ ID NO: 14437 - protein, 20 aa, Bos taurus
VLLDLGFSGLWSFLWFVGFC

SEQ ID NO: 14438 - protein, 22 aa, Bos taurus
LWWTYTGSIFFRVIFEAAFMYV

SEQ ID NO: 14439 - protein, 20 aa, Bos taurus
LLWAYVAQLGVRLALEGAAL

SEQ ID NO: 14440 - protein, 20 aa, Bos taurus
LAGFWLLSLLLQLPLILFLL

SEQ ID NO: 14441 - protein, 16 aa, Bos taurus
GALMGTYVASVLCKSV

SEQ ID NO: 14442 - protein, 20 aa, Bos taurus
WPLVLMVFNVGATVLYITAF

SEQ ID NO: 14443 - protein, 20 aa, Bos taurus
FQVVISRICMAIPAMAIPPV

SEQ ID NO: 14444 - protein, 20 aa, Bos taurus
VIGDLLFSALWTFLWFVGFC

SEQ ID NO: 14445 - protein, 20 aa, Bos taurus
FLALDPRALASFLYFTALVL

SEQ ID NO: 14446 - protein, 20 aa, Bos taurus
FMFILMIILTAFLCGLNNIY

SEQ ID NO: 14447 - protein, 20 aa, Bos taurus
AFAFMESLTLGLLDCPGVSA

SEQ ID NO: 14448 - protein, 20 aa, Bos taurus
YLLRPASMFYIFAGLCLSVS

SEQ ID NO: 14449 - protein, 17 aa, Bos taurus
LLAGSLAVATSQTLINP

SEQ ID NO: 14450 - protein, 20 aa, Bos taurus
FMFLFGGVLMTLLGLLGSLF

SEQ ID NO: 14451 - protein, 20 aa, Bos taurus
IMFIIAGLCAIAGVSVFANM

SEQ ID NO: 14452 - protein, 20 aa, Bos taurus
VAFIVGQYLLYGVFLDTLHV

SEQ ID NO: 14453 - protein, 21 aa, Bos taurus
VPAAFAGLMYLFVRQKYFVGY

SEQ ID NO: 14454 - protein, 22 aa, Bos taurus
FSFMAFFFTFMAQLVISIIQAV

SEQ ID NO: 14455 - protein, 20 aa, Bos taurus
FFSVFLGIIFFLELTAGVLA

SEQ ID NO: 14456 - protein, 20 aa, Bos taurus
ICAWMQLLAALCLVLGCMIF

SEQ ID NO: 14457 - protein, 20 aa, Bos taurus
VAVMLFAAVVLQVCSLVLYP

SEQ ID NO: 14458 - protein, 20 aa, Bos taurus
AFMYILGICLIIELIGGVVA

SEQ ID NO: 14459 - protein, 16 aa, Bos taurus
YALAGGVSFPFFWLAG

SEQ ID NO: 14460 - protein, 20 aa, Bos taurus
LLLLAWYFGSLLVIFCVELA

SEQ ID NO: 14461 - protein, 20 aa, Bos taurus
LVARAAFEVAFLVGQYLLYG

SEQ ID NO: 14462 - protein, 22 aa, Bos taurus
IYVLQLLARTVFEVGFLVGQYF

SEQ ID NO: 14463 - protein, 20 aa, Bos taurus
VFCSAIGLLGAIYCLSVSGT

SEQ ID NO: 14464 - protein, 24 aa, Bos taurus
LAATAGALHILAGICGMVAVSWYA

SEQ ID NO: 14465 - protein, 20 aa, Bos taurus
IVSTFMGFAGALSLIVAMTV

SEQ ID NO: 14466 - protein, 20 aa, Bos taurus
SFFLGGVVIVLLRWPLLGMC

SEQ ID NO: 14467 - protein, 20 aa, Bos taurus
ISYLVLSMISMGLFSIAPLI

SEQ ID NO: 14468 - protein, 20 aa, Bos taurus
LGISVALTFPSTMMASYYLL

SEQ ID NO: 14469 - protein, 20 aa, Bos taurus
VCLPTVSLWILFVYIEAAIR

SEQ ID NO: 14470 - protein, 20 aa, Bos taurus
GFFLGGVFVVLIGWPLIGMI

SEQ ID NO: 14471 - protein, 20 aa, Bos taurus
IDAFSTGLWALLLGLHLAEQ

SEQ ID NO: 14472 - protein, 20 aa, Bos taurus
IAMTGGIIFILAGLAALIAC

SEQ ID NO: 14473 - protein, 20 aa, Bos taurus
AGVMLVLVALCAMVATIWFP

SEQ ID NO: 14474 - protein, 20 aa, Bos taurus
LAYFFTTGIVVSAFGFPVIL

SEQ ID NO: 14475 - protein, 20 aa, Bos taurus
FSLCLTVVFLLQLAAGVLGF

SEQ ID NO: 14476 - protein, 20 aa, Bos taurus
AFAAISSVLSGLLGMVGHMM

SEQ ID NO: 14477 - protein, 20 aa, Bos taurus
LYFGLLLIIFLLEIIAGALA

SEQ ID NO: 14478 - protein, 20 aa, Bos taurus
NIWLFLVTSGTLAGIMGMRF

SEQ ID NO: 14479 - protein, 22 aa, Bos taurus
LWWTYLLSLVFKLLIEFLFLYL

SEQ ID NO: 14480 - protein, 25 aa, Bos taurus
LLMSFFVLLLIILLAEVTLAILLFV

SEQ ID NO: 14481 - protein, 20 aa, Bos taurus
FFSVFLGLIFFLELATGILA

SEQ ID NO: 14482 - protein, 20 aa, Bos taurus
FVLQAIGIPGWGFSGWISAL

SEQ ID NO: 14483 - protein, 20 aa, Bos taurus
LISVMILTRVIMQIIKDMIL

SEQ ID NO: 14484 - protein, 20 aa, Bos taurus
IACLAGIVFILSGLCSMTGC

SEQ ID NO: 14485 - protein, 20 aa, Bos taurus
VANFFLLLLVLAVLFFHQLV

SEQ ID NO: 14486 - protein, 22 aa, Bos taurus
LWWTYTSSIFFRIVFEAAFMYV

SEQ ID NO: 14487 - protein, 23 aa, Bos taurus
LSTAILHFRLFVRARIYHTIAYL

SEQ ID NO: 14488 - protein, 20 aa, Bos taurus
LMSWSAVANGGGVPAGGLVA

SEQ ID NO: 14489 - protein, 20 aa, Bos taurus
VAVVGGVFFILGGLLGFIPV

SEQ ID NO: 14490 - protein, 22 aa, Bos taurus
FYIIQVVFRNALEIGFLVGQYF

SEQ ID NO: 14491 - protein, 20 aa, Bos taurus
LMFTMVLVTFSIVTSVCVLN

SEQ ID NO: 14492 - protein, 22 aa, Bos taurus
TYAISSSLISFYIPVAIMIVTY

SEQ ID NO: 14493 - protein, 23 aa, Bos taurus
FYITGVFQILAGLCVMSAASIYT

SEQ ID NO: 14494 - protein, 20 aa, Bos taurus
ISFVAGTTLLIAGAPGIIGS

SEQ ID NO: 14495 - protein, 20 aa, Bos taurus
LAASLVLTVGSALLSAYFLL

SEQ ID NO: 14496 - protein, 20 aa, Bos taurus
YVYMFLAPLLIPIITPLVAV

SEQ ID NO: 14497 - protein, 20 aa, Bos taurus
LVYLFTVRIHGALGFLGGVL

SEQ ID NO: 14498 - protein, 20 aa, Bos taurus
GTIILTAVYFALSISLHVWV

SEQ ID NO: 14499 - protein, 20 aa, Bos taurus
ITGYAVWLVLWVTWNVFVIC

SEQ ID NO: 14500 - protein, 20 aa, Bos taurus
MNVVSAIVSLAGVLLLLVDL

SEQ ID NO: 14501 - protein, 20 aa, Bos taurus
AMAAAFQLASFVLVIGLVTF

SEQ ID NO: 14502 - protein, 20 aa, Bos taurus
AGLLFFLAGTVSLSPSIWVI

SEQ ID NO: 14503 - protein, 20 aa, Bos taurus
LSAYFCLLLAIFLVELVAGV

SEQ ID NO: 14504 - protein, 20 aa, Bos taurus
WTLLTEACYFSVQFLVVTAT

SEQ ID NO: 14505 - protein, 20 aa, Bos taurus
TTVGLWFNGSAFALYLSAAI

SEQ ID NO: 14506 - protein, 20 aa, Bos taurus
CLDFTVTVHFFHLLGCWLYS

SEQ ID NO: 14507 - protein, 18 aa, Bos taurus
QWLTYWVVYGVFSIVEFF

SEQ ID NO: 14508 - protein, 20 aa, Bos taurus
IFWLGLVACPVLWVVFAFSA

SEQ ID NO: 14509 - protein, 20 aa, Bos taurus
FLLLSSIVGRAAVAPVTWSV

SEQ ID NO: 14510 - protein, 22 aa, Bos taurus
SHPAACLAAVLAVGFLVLWAAG

SEQ ID NO: 14511 - protein, 25 aa, Bos taurus
LLGLYFGTLLLLFATQITLGILIST

SEQ ID NO: 14512 - protein, 17 aa, Bos taurus
ALGGPVYVSTFYAGMSI

SEQ ID NO: 14513 - protein, 20 aa, Bos taurus
GGFAPCFLGCFLPLVGTLNG

SEQ ID NO: 14514 - protein, 25 aa, Bos taurus
MMILFFVGLLMILLLQVAAGIVATT

SEQ ID NO: 14515 - protein, 20 aa, Bos taurus
LLFAPAFLSLFFLVMNFLEG

SEQ ID NO: 14516 - protein, 20 aa, Bos taurus
LLDLILAVIWAGVWAVGFCF

SEQ ID NO: 14517 - protein, 20 aa, Bos taurus
TMKVVLMLLFICLGNVYLHG

SEQ ID NO: 14518 - protein, 22 aa, Bos taurus
FWCYKGAIGKVYHALNPKLTVI

SEQ ID NO: 14519 - protein, 20 aa, Bos taurus
ILCMILAIISMILTIVELST

SEQ ID NO: 14520 - protein, 20 aa, Bos taurus
VLLFFYMIILGLVFIFQFGI

SEQ ID NO: 14521 - protein, 20 aa, Bos taurus
LIMTACLAFLTGILLLGALL

SEQ ID NO: 14522 - protein, 20 aa, Bos taurus
AMFLTLIFLVELVAAIIGFV

SEQ ID NO: 14523 - protein, 20 aa, Bos taurus
GGLVGLVFGGLYPVFLAIPV

SEQ ID NO: 14524 - protein, 20 aa, Bos taurus
LAIFLTTGIVVSAFGLPIVF

SEQ ID NO: 14525 - protein, 20 aa, Bos taurus
LLALALVNLLLSAACSLGLL

SEQ ID NO: 14526 - protein, 21 aa, Bos taurus
FSIFYNNTLFLVLVIVASFFI

SEQ ID NO: 14527 - protein, 20 aa, Bos taurus
VAISAINFLICEAGNHFINV

SEQ ID NO: 14528 - protein, 20 aa, Bos taurus
WLFIGFMLMFGSLIASMWIL

SEQ ID NO: 14529 - protein, 20 aa, Bos taurus
FVIILLLVFVTEVVVVVLGY

SEQ ID NO: 14530 - protein, 20 aa, Bos taurus
FFFILLLIFIAEVAAAVVAL

SEQ ID NO: 14531 - protein, 20 aa, Bos taurus
MFLSSLLNAITVIGAAYCLL

SEQ ID NO: 14532 - protein, 20 aa, Bos taurus
MIFSALGIAFSGYCLVISAL

SEQ ID NO: 14533 - protein, 20 aa, Bos taurus
VLLFFYMIILLLVFIVQFSV

SEQ ID NO: 14534 - protein, 20 aa, Bos taurus
AVFMLLGHLIFFDYGANAAI

SEQ ID NO: 14535 - protein, 21 aa, Bos taurus
CVASLFYFGASVLEALAAIQL

SEQ ID NO: 14536 - protein, 20 aa, Bos taurus
ACALLSLTCALGLLASIAMT

SEQ ID NO: 14537 - protein, 20 aa, Bos taurus
LLFFFLFILIIFLAELSAAI

SEQ ID NO: 14538 - protein, 20 aa, Bos taurus
FMAFFFIFGAQFILTIIQAV

SEQ ID NO: 14539 - protein, 20 aa, Bos taurus
TGFCQLCTSVAVFTGALIYA

SEQ ID NO: 14540 - protein, 20 aa, Bos taurus
WKVALAAAMVSGIAVVLAMT

SEQ ID NO: 14541 - protein, 20 aa, Bos taurus
LIFGFLFLTSGMLISVLGIW

SEQ ID NO: 14542 - protein, 20 aa, Bos taurus
LLRCLIYTLWTYLWEFTTGF

SEQ ID NO: 14543 - protein, 20 aa, Bos taurus
WLIPFFCYRLFDFVLSCLVA

SEQ ID NO: 14544 - protein, 20 aa, Bos taurus
FFRTLVAAILYLITSIVVLV

SEQ ID NO: 14545 - protein, 20 aa, Bos taurus
LLALAAFSTATAATIIGAGR

SEQ ID NO: 14546 - protein, 20 aa, Bos taurus
ALVVLLSGLVLLVTGLTLAG

SEQ ID NO: 14547 - protein, 20 aa, Bos taurus
IASVTVTFSNILNSAFLGFV

SEQ ID NO: 14548 - protein, 20 aa, Bos taurus
LTFWEASQLFLLLLSLTLAT

SEQ ID NO: 14549 - protein, 20 aa, Bos taurus
LIPITTATFIVAGICFNVAL

SEQ ID NO: 14550 - protein, 20 aa, Bos taurus
HQHLYFFLIGPPLLTLVNFE

SEQ ID NO: 14551 - protein, 20 aa, Bos taurus
ISCVLFLLPYWYVFLLDKTS

SEQ ID NO: 14552 - protein, 20 aa, Bos taurus
LVSIIFCEAVAIYGIIMAIV

SEQ ID NO: 14553 - protein, 16 aa, Bos taurus
AVLWRCFSTVVIFLFL

SEQ ID NO: 14554 - protein, 20 aa, Bos taurus
FFQSLCVLGYCILPLTMAML

SEQ ID NO: 14555 - protein, 20 aa, Bos taurus
PIYIILVGGWSFSLYLIQLV

SEQ ID NO: 14556 - protein, 20 aa, Bos taurus
FFSILQNIVGTALMILVAIG

SEQ ID NO: 14557 - protein, 20 aa, Bos taurus
TIAVVVFHFIVPMLVVIFCY

SEQ ID NO: 14558 - protein, 20 aa, Bos taurus
FGGSFLGLMVFLIYLGGMMV

SEQ ID NO: 14559 - protein, 20 aa, Bos taurus
VPLGLYAGQLALNWAWPPLF

SEQ ID NO: 14560 - protein, 20 aa, Bos taurus
VCLNTQLLLVNICSWLYYLP

SEQ ID NO: 14561 - protein, 13 aa, Bos taurus
WGFRWLIFRIMLG

SEQ ID NO: 14562 - protein, 20 aa, Bos taurus
AALCAYAVTYTAMYVTLVFR

SEQ ID NO: 14563 - protein, 20 aa, Bos taurus
LAYVLLLLLELLVCLFTLLG

SEQ ID NO: 14564 - protein, 20 aa, Bos taurus
LLPFLSLQIMDFLLCLLTLM

SEQ ID NO: 14565 - protein, 20 aa, Bos taurus
FVVQVSVFIGVLIDLWKITK

SEQ ID NO: 14566 - protein, 20 aa, Bos taurus
LFRPLILPLTQAPIFISFFI

SEQ ID NO: 14567 - protein, 22 aa, Bos taurus
HLLAYSGYKYVGMILSVLTGLL

SEQ ID NO: 14568 - protein, 20 aa, Bos taurus
FYPLLVILHFIQLFFINHVI

SEQ ID NO: 14569 - protein, 20 aa, Bos taurus
FSLYYLFLPYLLLIVNLLFF

SEQ ID NO: 14570 - protein, 20 aa, Bos taurus
GVSFGCVASVLGYCLLPMIL

SEQ ID NO: 14571 - protein, 20 aa, Bos taurus
LIGRFVPFAAVAAANCINIP

SEQ ID NO: 14572 - protein, 20 aa, Bos taurus
LFILYFFNLAVLSTYLPQDA

SEQ ID NO: 14573 - protein, 18 aa, Bos taurus
LVGRWVPFAAVAAANCVN

SEQ ID NO: 14574 - protein, 20 aa, Bos taurus
LGLIVLPTIILILLHYCVFM

SEQ ID NO: 14575 - protein, 20 aa, Bos taurus
VLGYCLLPMVILSSCAIFFS

SEQ ID NO: 14576 - protein, 20 aa, Bos taurus
MVVAAFLALAHSSFFTMIFL

SEQ ID NO: 14577 - protein, 20 aa, Bos taurus
NAFIVFIASSLSHMLLTCIL

SEQ ID NO: 14578 - protein, 20 aa, Bos taurus
LFFFLLFLRLFPMTPNWFLN

SEQ ID NO: 14579 - protein, 20 aa, Bos taurus
LLQALFLLQGMFVSLFPIHL

SEQ ID NO: 14580 - protein, 20 aa, Bos taurus
PVGRVLWAGLTLLEVPVCLA

SEQ ID NO: 14581 - protein, 16 aa, Bos taurus
FIPVIILAQLSGMNVI

SEQ ID NO: 14582 - protein, 20 aa, Bos taurus
IGVGLFTNLVYFGLLQTFPF

SEQ ID NO: 14583 - protein, 20 aa, Bos taurus
FELEIYYIQHVMLYVVPIYL

SEQ ID NO: 14584 - protein, 20 aa, Bos taurus
HRFISFTLYLTGFCMFVLSL

SEQ ID NO: 14585 - protein, 22 aa, Bos taurus
EWASVMRCVAVFVGINHASAKL

SEQ ID NO: 14586 - protein, 20 aa, Bos taurus
AVVFGGFYLFFFTEKILKML

SEQ ID NO: 14587 - protein, 20 aa, Bos taurus
PVVPSLFQLLGRNFILFIIF

SEQ ID NO: 14588 - protein, 18 aa, Bos taurus
YLKTWFVIDLLSCLPYDV

SEQ ID NO: 14589 - protein, 20 aa, Bos taurus
MVAWMIALHTAIHTIAHLFN

SEQ ID NO: 14590 - protein, 20 aa, Bos taurus
VFYIAAQCLGAIIGAGILYL

SEQ ID NO: 14591 - protein, 20 aa, Bos taurus
WRYFAGNLASGGAAGATSLC

SEQ ID NO: 14592 - protein, 22 aa, Bos taurus
RAICYMVAQLLGAVAGAAVLYS

SEQ ID NO: 14593 - protein, 16 aa, Bos taurus
ISAGLMTGGVAVFIGQ

SEQ ID NO: 14594 - protein, 20 aa, Bos taurus
LHGLLHVFAFVIALVGLVAV

SEQ ID NO: 14595 - protein, 21 aa, Bos taurus
FLLKAVIGMTAGATGAFVGTP

SEQ ID NO: 14596 - protein, 20 aa, Bos taurus
WRYFAGNLASGGAAGATSLC

SEQ ID NO: 14597 - protein, 24 aa, Bos taurus
VLRAIMYIIAQCVGAIVATAILSG

SEQ ID NO: 14598 - protein, 21 aa, Bos taurus
AVFYVAAQLLGAVAGAALLHE

SEQ ID NO: 14599 - protein, 19 aa, Bos taurus
YKSTFQFKLDVLSVIPTDL

SEQ ID NO: 14600 - protein, 20 aa, Bos taurus
MNIIDIVSILPYFITLGTDL

SEQ ID NO: 14601 - protein, 20 aa, Bos taurus
LLAGFAFLTGVGLGPALDLC

SEQ ID NO: 14602 - protein, 19 aa, Bos taurus
LALAWTFSYLLFFRALSLL

SEQ ID NO: 14603 - protein, 19 aa, Bos taurus
KSQRFKMDMLCLLPLDLLY

SEQ ID NO: 14604 - protein, 20 aa, Bos taurus
FNNYLAALYKVVGTFLFGAA

SEQ ID NO: 14605 - protein, 17 aa, Bos taurus
SIQVMSRVFLIWAVTHS

SEQ ID NO: 14606 - protein, 20 aa, Bos taurus
VAALYKQVGCFLFGCAISQS

SEQ ID NO: 14607 - protein, 20 aa, Bos taurus
WYYMIELSFYWSLLFSIASD

SEQ ID NO: 14608 - protein, 20 aa, Bos taurus
AMWNRWFGIFANLPIGVPYS

SEQ ID NO: 14609 - protein, 20 aa, Bos taurus
FWNCLDVVIIVLSVVAIGIN

SEQ ID NO: 14610 - protein, 20 aa, Bos taurus
LLPMRMLPSIIFTCITYFLL

SEQ ID NO: 14611 - protein, 20 aa, Bos taurus
LYHWYLLELSFYISLLMTLP

SEQ ID NO: 14612 - protein, 20 aa, Bos taurus
WRYFAGNLASGGAAGATSLC

SEQ ID NO: 14613 - protein, 17 aa, Bos taurus
IVFVVSFVGNRGTFIRG

SEQ ID NO: 14614 - protein, 20 aa, Bos taurus
LFLLGAFNVCNKIIFLMSFV

SEQ ID NO: 14615 - protein, 20 aa, Bos taurus
LSTLLVGTAIWYVCTAIFSN

SEQ ID NO: 14616 - protein, 20 aa, Bos taurus
AAMHLLAFLLTVLGLHAVFE

SEQ ID NO: 14617 - protein, 20 aa, Bos taurus
ILLAMFLVHYAQRSLVFPFL

SEQ ID NO: 14618 - protein, 20 aa, Bos taurus
IFPAALLPLLLTMILFLGPL

SEQ ID NO: 14619 - protein, 20 aa, Bos taurus
AFHPTLVAEGLFAFANVLSY

SEQ ID NO: 14620 - protein, 22 aa, Bos taurus
EVYLALDVLFCTSSIVHLCAIS

SEQ ID NO: 14621 - protein, 20 aa, Bos taurus
QLSMNLGMAIPLWAGAVITG

SEQ ID NO: 14622 - protein, 21 aa, Bos taurus
TSLYLAASASAEFFADIALAP

SEQ ID NO: 14623 - protein, 20 aa, Bos taurus
PLCMLDIFVLIASVPVVAVG

SEQ ID NO: 14624 - protein, 20 aa, Bos taurus
MDFVMNSLYLATISLKIVAF

SEQ ID NO: 14625 - protein, 19 aa, Bos taurus
HTMQFKLDVASIIPTDLIY

SEQ ID NO: 14626 - protein, 24 aa, Bos taurus
IKLPVYTLAQTLGAFLGAGIIFGL

SEQ ID NO: 14627 - protein, 20 aa, Bos taurus
ALASVVSLWMVTGILLYLAF

SEQ ID NO: 14628 - protein, 20 aa, Bos taurus
VVCVLFIFRNLLDMVRYTYS

SEQ ID NO: 14629 - protein, 20 aa, Bos taurus
GVFVPNSNIVHVFSAGSAAF

SEQ ID NO: 14630 - protein, 20 aa, Bos taurus
GIGFSSCIVCLFVGLYYNVI

SEQ ID NO: 14631 - protein, 20 aa, Bos taurus
WRWFLANLASGGAAGATSLC

SEQ ID NO: 14632 - protein, 18 aa, Bos taurus
LNVIDLLAILPYYVTIFL

SEQ ID NO: 14633 - protein, 20 aa, Bos taurus
SVMSLIDVVAILPYYIGLFM

SEQ ID NO: 14634 - protein, 20 aa, Bos taurus
HWVLQLLALLCALLGLGLVI

SEQ ID NO: 14635 - protein, 20 aa, Bos taurus
PADYLFMLLFNWICIVITGL

SEQ ID NO: 14636 - protein, 20 aa, Bos taurus
LILLGAANLCNKIVFLVSFV

SEQ ID NO: 14637 - protein, 20 aa, Bos taurus
LLGYVSLSPALTFAVAGLGS

SEQ ID NO: 14638 - protein, 20 aa, Bos taurus
AEVLAGFVNGLFLIFTAFFI

SEQ ID NO: 14639 - protein, 13 aa, Bos taurus
SMAGATAQTFIYP

SEQ ID NO: 14640 - protein, 20 aa, Bos taurus
EYIACVILGVIFLLSSVCIV

SEQ ID NO: 14641 - protein, 16 aa, Bos taurus
ILAGCTTGAMAVTCAQ

SEQ ID NO: 14642 - protein, 14 aa, Bos taurus
LGAGVPEAVVVVCP

SEQ ID NO: 14643 - protein, 17 aa, Bos taurus
LMAGSMAGMTAVICTYP

SEQ ID NO: 14644 - protein, 20 aa, Bos taurus
GWWVFHHYVSTFLSGVMLTW

SEQ ID NO: 14645 - protein, 20 aa, Bos taurus
MLAGCGAGTCQVIVTTPMEM

SEQ ID NO: 14646 - protein, 20 aa, Bos taurus
FLAGAAAGAIQCVICCPMEL

SEQ ID NO: 14647 - protein, 20 aa, Bos taurus
IIDLLAILPFYITLLVESLS

SEQ ID NO: 14648 - protein, 13 aa, Bos taurus
SLAGAIAQSSIYP

SEQ ID NO: 14649 - protein, 20 aa, Bos taurus
LEVLAVFASTVLAQLGALFI

SEQ ID NO: 14650 - protein, 20 aa, Bos taurus
MVAGALARLGTVTVISPLEL

SEQ ID NO: 14651 - protein, 20 aa, Bos taurus
GFQPTWHLLAVLGGLYAFFL

SEQ ID NO: 14652 - protein, 16 aa, Bos taurus
LLAGSTTGALAVAVAQ

SEQ ID NO: 14653 - protein, 20 aa, Bos taurus
NKAGLVLGLLSCLGLSLVAN

SEQ ID NO: 14654 - protein, 25 aa, Bos taurus
IILGAGSRSVAGVCMSPITVIKTRY

SEQ ID NO: 14655 - protein, 20 aa, Bos taurus
LEVLSAMISVLLVYILMGFL

SEQ ID NO: 14656 - protein, 20 aa, Bos taurus
WLNISGLVALCLASFGMTLL

SEQ ID NO: 14657 - protein, 20 aa, Bos taurus
VFNFLLVWYYCTLTIRESIL

SEQ ID NO: 14658 - protein, 20 aa, Bos taurus
YLMPVTHMLAASVGEVVACL

SEQ ID NO: 14659 - protein, 20 aa, Bos taurus
VILWTGLLCALGTSIVGNFQ

SEQ ID NO: 14660 - protein, 20 aa, Bos taurus
HFESPLLWQSVVMILTMLLM

SEQ ID NO: 14661 - protein, 20 aa, Bos taurus
IVAGIVARLGAVTVISPLEL

SEQ ID NO: 14662 - protein, 20 aa, Bos taurus
VHVLCLTLGYFIFDLGWCIY

SEQ ID NO: 14663 - protein, 20 aa, Bos taurus
FLCGGLSACVATLAVHPVDV

SEQ ID NO: 14664 - protein, 16 aa, Bos taurus
RSLYVACTALALQLVM

SEQ ID NO: 14665 - protein, 20 aa, Bos taurus
LLASMVAGVVSVGLGAPVDL

SEQ ID NO: 14666 - protein, 22 aa, Bos taurus
GLSQQPGGTVVAGAVAGALGAF

SEQ ID NO: 14667 - protein, 20 aa, Bos taurus
IMVAALGWATAELIMSRCIP

SEQ ID NO: 14668 - protein, 20 aa, Bos taurus
LFFAVSGIMDMLTYLITHVP

SEQ ID NO: 14669 - protein, 20 aa, Bos taurus
TLRNGEVLLFCITAAMYMFF

SEQ ID NO: 14670 - protein, 20 aa, Bos taurus
TCWLYYFSKFIELLDTIFFI

SEQ ID NO: 14671 - protein, 21 aa, Bos taurus
FVTAAFYGNMYASIMLMTAIS

SEQ ID NO: 14672 - protein, 20 aa, Bos taurus
IAGFLAVFSSESAIFLLMLA

SEQ ID NO: 14673 - protein, 20 aa, Bos taurus
WMTYEAVITGFFPFFLIATV

SEQ ID NO: 14674 - protein, 20 aa, Bos taurus
IACPIFAGLLHFFFLAAFAW

SEQ ID NO: 14675 - protein, 20 aa, Bos taurus
CAVFAALLHFFFLAAFTWMF

SEQ ID NO: 14676 - protein, 20 aa, Bos taurus
IACPIFAGLLHYFFLAAFSW

SEQ ID NO: 14677 - protein, 32 aa, Bos taurus
PAVQKGLRYGMILFIISEVLFFTGFFWAFYHS

SEQ ID NO: 14678 - protein, 22 aa, Bos taurus
NLEGFFATLGGEIALWSLVVLA

SEQ ID NO: 14679 - protein, 22 aa, Bos taurus
NVWAAVDVLCCTASIMGLCIIS

SEQ ID NO: 14680 - protein, 21 aa, Bos taurus
IFVTLDVMMCTASILNLCAIS

SEQ ID NO: 14681 - protein, 21 aa, Bos taurus
LFPFLQKSSVGITVLNLCALS

SEQ ID NO: 14682 - protein, 26 aa, Bos taurus
YLCKIASASVSFNLYASVFLLTCLSI

SEQ ID NO: 14683 - protein, 19 aa, Bos taurus
AVHVIYTVNLYSSVLILAF

SEQ ID NO: 14684 - protein, 21 aa, Bos taurus
LVPFIQKASVGITVLSLCALS

SEQ ID NO: 14685 - protein, 21 aa, Bos taurus
FWLSMDYVASTASIFSVFILC

SEQ ID NO: 14686 - protein, 20 aa, Bos taurus
YNTCMKVVYIACSFTTVWMI

SEQ ID NO: 14687 - protein, 18 aa, Bos taurus
PAFGISFVLCISCILVKT

SEQ ID NO: 14688 - protein, 21 aa, Bos taurus
LWLALDYVVSNASVMNLLIIS

SEQ ID NO: 14689 - protein, 21 aa, Bos taurus
VIDVLICGSMVSSLCFLGAIA

SEQ ID NO: 14690 - protein, 21 aa, Bos taurus
AVKYLQMVGMYASSYMILAMT

SEQ ID NO: 14691 - protein, 22 aa, Bos taurus
KIVISIDYYNMFTSIFTLCTMS

SEQ ID NO: 14692 - protein, 20 aa, Bos taurus
FLLYAYWIGLGILSSVGLGT

SEQ ID NO: 14693 - protein, 22 aa, Bos taurus
NTAGFFTVFASELSVYTLTVIT

SEQ ID NO: 14694 - protein, 22 aa, Bos taurus
LLRQGLIDTSLTVSVANLLAIA

SEQ ID NO: 14695 - protein, 22 aa, Bos taurus
EFWTSIDVLCVTASIETLCVIA

SEQ ID NO: 14696 - protein, 20 aa, Bos taurus
LQIDMAFNVFFLLYFGLRFI

SEQ ID NO: 14697 - protein, 22 aa, Bos taurus
EIYLALDVLFCTSSIVHLCAIS

SEQ ID NO: 14698 - protein, 21 aa, Bos taurus
LFTGFYFIGYFGGIFFIILLT

SEQ ID NO: 14699 - protein, 27 aa, Bos taurus
VLIGFFYGNMYCSILFMTCLSVQRYWV

SEQ ID NO: 14700 - protein, 20 aa, Bos taurus
VLWWYYFSKLIEFMDTFFFI

SEQ ID NO: 14701 - protein, 20 aa, Bos taurus
ALTLVEMAITTFYSMCFYLL

SEQ ID NO: 14702 - protein, 21 aa, Bos taurus
WFLREGSMFVALSASVFSLLA

SEQ ID NO: 14703 - protein, 20 aa, Bos taurus
AGALFNINFYAGALLLACIS

SEQ ID NO: 14704 - protein, 22 aa, Bos taurus
AVWIYLDVLFSTASIMHLCAIS

SEQ ID NO: 14705 - protein, 22 aa, Bos taurus
NIWVAFDIMCSTASILNLCVIS

SEQ ID NO: 14706 - protein, 20 aa, Bos taurus
VLAMLLHYFFLSAFAWMLVE

SEQ ID NO: 14707 - protein, 20 aa, Bos taurus
ITAFFFIGFFGGIFFITVIS

SEQ ID NO: 14708 - protein, 22 aa, Bos taurus
VSQFIHLYLMGCNYFWMLCEGI

SEQ ID NO: 14709 - protein, 20 aa, Bos taurus
VFFSLHAVALTLVVIVQCLL

SEQ ID NO: 14710 - protein, 20 aa, Bos taurus
ISNFLLIHNMFTSVFLLTVI

SEQ ID NO: 14711 - protein, 21 aa, Bos taurus
FQNLFPITAMFVSIYSMTAIA

SEQ ID NO: 14712 - protein, 21 aa, Bos taurus
VVDSLFILSLLGSICSLSVIA

SEQ ID NO: 14713 - protein, 21 aa, Bos taurus
FFGLTMTVFGLSSLFIASAMA

SEQ ID NO: 14714 - protein, 21 aa, Bos taurus
VTSALYTVNFVSGMQFLACIS

SEQ ID NO: 14715 - protein, 21 aa, Bos taurus
AAGFFTVFASELSVYTLTAIT

SEQ ID NO: 14716 - protein, 21 aa, Bos taurus
LWLSIDYVASNASVMNLLVIS

SEQ ID NO: 14717 - protein, 21 aa, Bos taurus
LWTSVDVLCVTASIETLCALA

SEQ ID NO: 14718 - protein, 20 aa, Bos taurus
GFQGFVTALASICSSAAVAW

SEQ ID NO: 14719 - protein, 21 aa, Bos taurus
LQRFIFHVNLYGSILFLTCIS

SEQ ID NO: 14720 - protein, 19 aa, Bos taurus
AFLGCTAGLVTGWSLAFLA

SEQ ID NO: 14721 - protein, 21 aa, Bos taurus
LVKYLQVVGMFASTYLLLLMS

SEQ ID NO: 14722 - protein, 20 aa, Bos taurus
FAFAMTFFGLASTLILFAMA

SEQ ID NO: 14723 - protein, 19 aa, Bos taurus
TNILLASSIWYIAFFCPCD

SEQ ID NO: 14724 - protein, 20 aa, Bos taurus
VPFVEVSSLGVTTFSLCALG

SEQ ID NO: 14725 - protein, 20 aa, Bos taurus
FPWNLILLTIFTLSMAYLTG

SEQ ID NO: 14726 - protein, 22 aa, Bos taurus
LFLACFVLVLTQSSIFSLLAVA

SEQ ID NO: 14727 - protein, 20 aa, Bos taurus
YYWILVEGLYLHSLIFMAFF

SEQ ID NO: 14728 - protein, 21 aa, Bos taurus
ITALVFYINTYAGVNFMTCLS

SEQ ID NO: 14729 - protein, 20 aa, Bos taurus
PFVQCVSITVSIFSLVLIAV

SEQ ID NO: 14730 - protein, 20 aa, Bos taurus
FVIYSFLSLCFQYLGGESAI

SEQ ID NO: 14731 - protein, 21 aa, Bos taurus
VVSLLKEVNFYSGILLLACIS

SEQ ID NO: 14732 - protein, 22 aa, Bos taurus
SAAGFFTVFASELSVYTLTVIT

SEQ ID NO: 14733 - protein, 25 aa, Bos taurus
AVMVFFHYCVVSNYFWLFIEGLYLF

SEQ ID NO: 14734 - protein, 21 aa, Bos taurus
VVISIDYYNMFTSIFTLTMMS

SEQ ID NO: 14735 - protein, 20 aa, Bos taurus
WVFGGGLCHLVFFLQPVTVY

SEQ ID NO: 14736 - protein, 21 aa, Bos taurus
ATTVIFYGNMYCSILLLACIS

SEQ ID NO: 14737 - protein, 22 aa, Bos taurus
IPLLWCANILGYTVSTFAMVKG

SEQ ID NO: 14738 - protein, 18 aa, Bos taurus
FILLFFGLSGLSIICAMS

SEQ ID NO: 14739 - protein, 20 aa, Bos taurus
CFLAAFCWMSLEGVELYFLV

SEQ ID NO: 14740 - protein, 22 aa, Bos taurus
GFQALVLTALLVGLGVSAGLPL

SEQ ID NO: 14741 - protein, 21 aa, Bos taurus
FMGVIMVFFGLCPLLLGAAMA

SEQ ID NO: 14742 - protein, 19 aa, Bos taurus
GYTVSLCGITGLWSLAIIS

SEQ ID NO: 14743 - protein, 21 aa, Bos taurus
VIDSVICSSLLASICSLLSIA

SEQ ID NO: 14744 - protein, 21 aa, Bos taurus
LWTSVDVLCVTASIETLCVIA

SEQ ID NO: 14745 - protein, 21 aa, Bos taurus
LAGCFFFINTYCSVAFLAVIT

SEQ ID NO: 14746 - protein, 20 aa, Bos taurus
LMLTTSALTFIAFLLPFIYR

SEQ ID NO: 14747 - protein, 20 aa, Bos taurus
SILLASAVWYLIFFCPLDLF

SEQ ID NO: 14748 - protein, 20 aa, Bos taurus
FAFIMSFFGLASTLQLLAMA

SEQ ID NO: 14749 - protein, 20 aa, Bos taurus
VFGYIISVLKSVSMACLACI

SEQ ID NO: 14750 - protein, 20 aa, Bos taurus
VLQFCDFLGSLMSVWVTVIA

SEQ ID NO: 14751 - protein, 20 aa, Bos taurus
IAIIYLLSGVTGNLASAIFL

SEQ ID NO: 14752 - protein, 20 aa, Bos taurus
AWGWTCTFLGGFVLLVVFLA

SEQ ID NO: 14753 - protein, 20 aa, Bos taurus
FCASTVILHSIYLCCVRTVG

SEQ ID NO: 14754 - protein, 21 aa, Bos taurus
VHTFLFEACSYATLLHVLTLS

SEQ ID NO: 14755 - protein, 20 aa, Bos taurus
CILLRWVRLLGFATVYGTVT

SEQ ID NO: 14756 - protein, 20 aa, Bos taurus
MSFTLCISYILMKSLKILLA

SEQ ID NO: 14757 - protein, 20 aa, Bos taurus
VVGFLSIFASESSVFLLTLA

SEQ ID NO: 14758 - protein, 20 aa, Bos taurus
VMTLDGINQFTSIFCLTVMS

SEQ ID NO: 14759 - protein, 20 aa, Bos taurus
CGILLYENIYISVGFLCCIS

SEQ ID NO: 14760 - protein, 21 aa, Bos taurus
LKVACPVLILTQSSILALLAI

SEQ ID NO: 14761 - protein, 21 aa, Bos taurus
VLSYLKLFSMYAPAFMMVVIS

SEQ ID NO: 14762 - protein, 19 aa, Bos taurus
MTVDGINQFTSIFCLTVMS

SEQ ID NO: 14763 - protein, 21 aa, Bos taurus
VLFSLDFLTMHASIFTLTLMS

SEQ ID NO: 14764 - protein, 23 aa, Bos taurus
DNVFDSMICISVVASMCSLLAIA

SEQ ID NO: 14765 - protein, 20 aa, Bos taurus
LVPYAQGLAVQVSTITLTVI

SEQ ID NO: 14766 - protein, 18 aa, Bos taurus
YFMGVSVSVSTLSLVAIA

SEQ ID NO: 14767 - protein, 20 aa, Bos taurus
GASAGIALGIGLLCGLVAML

SEQ ID NO: 14768 - protein, 20 aa, Bos taurus
KVIPYLQAVSVSVAVLTLSF

SEQ ID NO: 14769 - protein, 20 aa, Bos taurus
ILLLLYSIGLYSEAFFNVLL

SEQ ID NO: 14770 - protein, 21 aa, Bos taurus
LMTCLLMIFTHASIMSLLAIA

SEQ ID NO: 14771 - protein, 20 aa, Bos taurus
LLKGALLFITIALIGSGWAF

SEQ ID NO: 14772 - protein, 20 aa, Bos taurus
LGPLPFWLLYCCPVCLQFFT

SEQ ID NO: 14773 - protein, 20 aa, Bos taurus
FGFIFYTNIYISIAFLCCIS

SEQ ID NO: 14774 - protein, 22 aa, Bos taurus
PMLLSTFSHFSLFHMAANMYVL

SEQ ID NO: 14775 - protein, 20 aa, Bos taurus
IFGFLLFVSNSVSILTLCLI

SEQ ID NO: 14776 - protein, 20 aa, Bos taurus
YNTSMKLIYIACSYATVYLI

SEQ ID NO: 14777 - protein, 20 aa, Bos taurus
GFGSLAFLPVAIGFTLGAAF

SEQ ID NO: 14778 - protein, 20 aa, Bos taurus
FLFGVLFAICFSCLVAHVLA

SEQ ID NO: 14779 - protein, 20 aa, Bos taurus
FSALLYLLISSASMLTLGII

SEQ ID NO: 14780 - protein, 20 aa, Bos taurus
LVALSILTVSLSYMVGMIAS

SEQ ID NO: 14781 - protein, 20 aa, Bos taurus
SAVLFYINMYVSIVFFGLIG

SEQ ID NO: 14782 - protein, 20 aa, Bos taurus
ILGALTVFYPSIALWLLAFI

SEQ ID NO: 14783 - protein, 20 aa, Bos taurus
ALLQGALLCSAVGDACLVWP

SEQ ID NO: 14784 - protein, 21 aa, Bos taurus
LFHYVCGVSMYASVLLIMTMS

SEQ ID NO: 14785 - protein, 20 aa, Bos taurus
TACLIYINMYLSIIFLAFVS

SEQ ID NO: 14786 - protein, 20 aa, Bos taurus
AGAVFQMNMYGSCIFLTLIN

SEQ ID NO: 14787 - protein, 18 aa, Bos taurus
ALFETVCFASILSVTTVS

SEQ ID NO: 14788 - protein, 20 aa, Bos taurus
AVLLFVAVAGLTFFALSFGF

SEQ ID NO: 14789 - protein, 21 aa, Bos taurus
LIFGIYKISFFSGMLLLLCIS

SEQ ID NO: 14790 - protein, 20 aa, Bos taurus
LFLYLAPNFCFLSLLANLLL

SEQ ID NO: 14791 - protein, 18 aa, Bos taurus
IFSSVYFLAAMSIDRYLV

SEQ ID NO: 14792 - protein, 19 aa, Bos taurus
VAVDQYNTFSSLYFLTVMS

SEQ ID NO: 14793 - protein, 20 aa, Bos taurus
SLYVSTNALLAIAIDRYLAI

SEQ ID NO: 14794 - protein, 20 aa, Bos taurus
VSLYVSTNALLAIAIDRYLA

SEQ ID NO: 14795 - protein, 23 aa, Bos taurus
HLAHLVAYGSAFAQALLIGYHAC

SEQ ID NO: 14796 - protein, 20 aa, Bos taurus
LVIYNFLSLCYEYLGGESSI

SEQ ID NO: 14797 - protein, 21 aa, Bos taurus
CITYLQYLGINASSCSITAFT

SEQ ID NO: 14798 - protein, 21 aa, Bos taurus
IFGICMVFSGLCPLFLGSLMA

SEQ ID NO: 14799 - protein, 20 aa, Bos taurus
FKAMLIAVGIHLLLLMFEVL

SEQ ID NO: 14800 - protein, 20 aa, Bos taurus
LAASVFAGLLFLAYATEVAL

SEQ ID NO: 14801 - protein, 20 aa, Bos taurus
ILWMVPIYSLDSWIALKYPS

SEQ ID NO: 14802 - protein, 20 aa, Bos taurus
FVAQMIVGMYFGLVALISLS

SEQ ID NO: 14803 - protein, 20 aa, Bos taurus
IFVGLVFSAIGDAFLIWQDQ

SEQ ID NO: 14804 - protein, 20 aa, Bos taurus
IVAFMAVLFCFHAAFMLFCI

SEQ ID NO: 14805 - protein, 18 aa, Bos taurus
VFAGMALVYGPVQWLRIG

SEQ ID NO: 14806 - protein, 24 aa, Bos taurus
YILGIAGLFTIFSSFVFSTVVIHF

SEQ ID NO: 14807 - protein, 20 aa, Bos taurus
WNIGVILLLTVMATAFMGYV

SEQ ID NO: 14808 - protein, 20 aa, Bos taurus
LGVLFMLAMSSLAVYSILWS

SEQ ID NO: 14809 - protein, 22 aa, Bos taurus
AVVYYMTTTIIAVVIGIIIVII

SEQ ID NO: 14810 - protein, 20 aa, Bos taurus
FAGATVHDFFNWLSVLVLLP

SEQ ID NO: 14811 - protein, 29 aa, Bos taurus
TIFSGRYIILLMGVFSIYTGLIYNDCFSK

SEQ ID NO: 14812 - protein, 20 aa, Bos taurus
AITAGLQGYNATLVGILMAI

SEQ ID NO: 14813 - protein, 20 aa, Bos taurus
AVVYYFCTTLIAVILGIVLV

SEQ ID NO: 14814 - protein, 20 aa, Bos taurus
FIHGWLIMSSLMLLFLFTYI

SEQ ID NO: 14815 - protein, 20 aa, Bos taurus
WGLALAAVVTVLSSLLMSVG

SEQ ID NO: 14816 - protein, 29 aa, Bos taurus
MFFNGRYILLLMGLFSVYTGLIYNDCFSK

SEQ ID NO: 14817 - protein, 20 aa, Bos taurus
LFFCSFIGMFMFYCAHWQTY

SEQ ID NO: 14818 - protein, 22 aa, Bos taurus
ALLFFLVTTLLASALGVGLALA

SEQ ID NO: 14819 - protein, 20 aa, Bos taurus
TSCFSWMEMLIISWVIGMIW

SEQ ID NO: 14820 - protein, 20 aa, Bos taurus
TFSWGIKMTVFAMIIGAFVA

SEQ ID NO: 14821 - protein, 20 aa, Bos taurus
WFVIGMVGAAFFILIQLVLL

SEQ ID NO: 14822 - protein, 20 aa, Bos taurus
LLSFALGGLLGNVFLHLLPE

SEQ ID NO: 14823 - protein, 20 aa, Bos taurus
ASGIFFMICVVIAAVFGIVI

SEQ ID NO: 14824 - protein, 19 aa, Bos taurus
LKVARSVLPLSVVFIGMIT

SEQ ID NO: 14825 - protein, 20 aa, Bos taurus
PIVNVSEVLGPLCLMLLMGT

SEQ ID NO: 14826 - protein, 20 aa, Bos taurus
LILQLFVGLAVGTLSGDALL

SEQ ID NO: 14827 - protein, 20 aa, Bos taurus
GVLLCLNYYSIALGAASLLL

SEQ ID NO: 14828 - protein, 20 aa, Bos taurus
VTLQFPLQEFILAMGFFLVL

SEQ ID NO: 14829 - protein, 20 aa, Bos taurus
LAETIMLLGFFMTVFLEQLV

SEQ ID NO: 14830 - protein, 20 aa, Bos taurus
LGVYQWLSLVILMTGVAFVQ

SEQ ID NO: 14831 - protein, 20 aa, Bos taurus
WLYAACSVSYLGAMVSSNSA

SEQ ID NO: 14832 - protein, 20 aa, Bos taurus
IIVGSTVTFVAGVYQVAMGF

SEQ ID NO: 14833 - protein, 20 aa, Bos taurus
SGQLSAFYLFSCIWGTFILI

SEQ ID NO: 14834 - protein, 20 aa, Bos taurus
FITTLLVHIFIALIVLGLLF

SEQ ID NO: 14835 - protein, 20 aa, Bos taurus
AAPFALSALLYGANNNLVIY

SEQ ID NO: 14836 - protein, 20 aa, Bos taurus
VLALCGLVCFQGLLGWYMVK

SEQ ID NO: 14837 - protein, 20 aa, Bos taurus
VTLAISMTFISTVAATGFLP

SEQ ID NO: 14838 - protein, 20 aa, Bos taurus
VLISARLVLLTLCGWVLCWT

SEQ ID NO: 14839 - protein, 22 aa, Bos taurus
TLFRSILLFLTRFTVLTATGWS

SEQ ID NO: 14840 - protein, 20 aa, Bos taurus
WFALGAALQLAISTYAAYVG

SEQ ID NO: 14841 - protein, 20 aa, Bos taurus
AYFGLTTLGASALAVALAFI

SEQ ID NO: 14842 - protein, 20 aa, Bos taurus
IAVLIMGCCPGGTVSNIFTF

SEQ ID NO: 14843 - protein, 20 aa, Bos taurus
PWKILALLYYPALYYPLAAC

SEQ ID NO: 14844 - protein, 20 aa, Bos taurus
GHAMGTAGVYYVMVTSTLSI

SEQ ID NO: 14845 - protein, 22 aa, Bos taurus
QAGLLLHGVNLATILCFPAAVA

SEQ ID NO: 14846 - protein, 22 aa, Bos taurus
IVSSLLLLFFFSFIYLGEVFKT

SEQ ID NO: 14847 - protein, 20 aa, Bos taurus
YYTLYSVILFCVFFWIPFVY

SEQ ID NO: 14848 - protein, 20 aa, Bos taurus
GAINSAAILLYALTCCISGY

SEQ ID NO: 14849 - protein, 20 aa, Bos taurus
ALMTTACFLFMFMGVFGGFS

SEQ ID NO: 14850 - protein, 20 aa, Bos taurus
GSPSGHCMITGAALWPIMTA

SEQ ID NO: 14851 - protein, 20 aa, Bos taurus
LTNTMETVLTIIALFYYPLE

SEQ ID NO: 14852 - protein, 20 aa, Bos taurus
MVFGLSVLYFLFLVFLLFLN

SEQ ID NO: 14853 - protein, 20 aa, Bos taurus
LCVILLILVFMVPFYIGYFI

SEQ ID NO: 14854 - protein, 20 aa, Bos taurus
PLFYVYAVFGFTSVVNRIIG

SEQ ID NO: 14855 - protein, 20 aa, Bos taurus
FAPATLVTPLGALSVLVSAI

SEQ ID NO: 14856 - protein, 19 aa, Bos taurus
EHFIQLITGVAVFLGVSFF

SEQ ID NO: 14857 - protein, 20 aa, Bos taurus
ILVLFGILLVMALVSSVGAL

SEQ ID NO: 14858 - protein, 20 aa, Bos taurus
IMSAITVLILILYFVIDNFV

SEQ ID NO: 14859 - protein, 20 aa, Bos taurus
IVGSAAFNMFIIIALCVYVV

SEQ ID NO: 14860 - protein, 19 aa, Bos taurus
DLLGKQLSFYSFGIIGIIM

SEQ ID NO: 14861 - protein, 19 aa, Bos taurus
EHFIHIITGVAVFLGVSFF

SEQ ID NO: 14862 - protein, 19 aa, Bos taurus
DEFGEQLSKVISLICVAVW

SEQ ID NO: 14863 - protein, 21 aa, Bos taurus
ILILFCILIAMSLVCSVGSAI

SEQ ID NO: 14864 - protein, 20 aa, Bos taurus
TITAVLTTFCVQMGYLLAGY

SEQ ID NO: 14865 - protein, 20 aa, Bos taurus
ALFLALVALSVVMVTLQGFA

SEQ ID NO: 14866 - protein, 20 aa, Bos taurus
VAGPLVFVLIIGVLGVLAYG

SEQ ID NO: 14867 - protein, 11 aa, Bos taurus
KTLIQTLGQMM

SEQ ID NO: 14868 - protein, 18 aa, Bos taurus
RLKTLVIKVSGVILSVVG

SEQ ID NO: 14869 - protein, 26 aa, Bos taurus
HHEFVALIGALLAICCMIFLGFADDV

SEQ ID NO: 14870 - protein, 20 aa, Bos taurus
AGIMVWVMIVMVILVLGYGI

SEQ ID NO: 14871 - protein, 22 aa, Bos taurus
NFMKWSIPAFLYFLDNLIVFYV

SEQ ID NO: 14872 - protein, 22 aa, Bos taurus
LFDHGLDSWSCVYFVVTVYSIF

SEQ ID NO: 14873 - protein, 20 aa, Bos taurus
LFGMIITIGQAIVYVMTGMY

SEQ ID NO: 14874 - protein, 20 aa, Bos taurus
SIAGSGAAFGSFIILCVGGL

SEQ ID NO: 14875 - protein, 20 aa, Bos taurus
GFWFFKFAAAIAIIIGAFFI

SEQ ID NO: 14876 - protein, 20 aa, Bos taurus
LFGMTITIGQSIVYVMTGMY

SEQ ID NO: 14877 - protein, 20 aa, Bos taurus
LLLLALSFCGFVVFTNLSLQ

SEQ ID NO: 14878 - protein, 20 aa, Bos taurus
ISFFFCFVWFLANFSYQEAL

SEQ ID NO: 14879 - protein, 22 aa, Bos taurus
FWPFAMVGGCIWATGNIAVVPI

SEQ ID NO: 14880 - protein, 20 aa, Bos taurus
FFATTAVVMAEVLKGLTCLL

SEQ ID NO: 14881 - protein, 20 aa, Bos taurus
SMLLMMAVIINLMFSGQWTV

SEQ ID NO: 14882 - protein, 20 aa, Bos taurus
IGTIVGSAVFNILFVIGTCA

SEQ ID NO: 14883 - protein, 20 aa, Bos taurus
IGAMSSYLFIVKYELPLVIQ

SEQ ID NO: 14884 - protein, 20 aa, Bos taurus
SCHQMSIGTFFLVSALAINV

SEQ ID NO: 14885 - protein, 20 aa, Bos taurus
VVAAVICLHNVGAMSSYLFI

SEQ ID NO: 14886 - protein, 20 aa, Bos taurus
VLASLTVMLAIFIVMTVLVK

SEQ ID NO: 14887 - protein, 20 aa, Bos taurus
LVYLLLWAAYLSVCQVGQVF

SEQ ID NO: 14888 - protein, 20 aa, Bos taurus
LCEVAIATYTFGTCIAFLII

SEQ ID NO: 14889 - protein, 20 aa, Bos taurus
FILSALLLWNFGLLIVDHIH

SEQ ID NO: 14890 - protein, 20 aa, Bos taurus
LIAIFLYTSATLTIAFTSAD

SEQ ID NO: 14891 - protein, 20 aa, Bos taurus
VMALRFLLGFLLAGVDLGVY

SEQ ID NO: 14892 - protein, 20 aa, Bos taurus
PAYAVLLAFLTGCIQLGMGF

SEQ ID NO: 14893 - protein, 20 aa, Bos taurus
VAVVFTVLGVGTIACTLFAF

SEQ ID NO: 14894 - protein, 20 aa, Bos taurus
LGCKWTLVLAMCCYVAFSLG

SEQ ID NO: 14895 - protein, 22 aa, Bos taurus
STFIGALFGNYTTFLGASFAYI

SEQ ID NO: 14896 - protein, 20 aa, Bos taurus
LAGVATSYAVWAASKSFAAF

SEQ ID NO: 14897 - protein, 22 aa, Bos taurus
ALGWHGPLLALSFLAFWVPWAP

SEQ ID NO: 14898 - protein, 20 aa, Bos taurus
AVYRMCFAMAAFFFLFSLLM

SEQ ID NO: 14899 - protein, 20 aa, Bos taurus
GFPGYLLLSVLQFLYPFIAM

SEQ ID NO: 14900 - protein, 20 aa, Bos taurus
FAANRVFGFAIVATSTLNML

SEQ ID NO: 14901 - protein, 20 aa, Bos taurus
LAANRVFGAAILLTSTLNML

SEQ ID NO: 14902 - protein, 20 aa, Bos taurus
AILLSLALYLLGMLAFPLLA

SEQ ID NO: 14903 - protein, 22 aa, Bos taurus
PRMNNMSFWLLPPSFLLLLASS

SEQ ID NO: 14904 - protein, 20 aa, Bos taurus
LALLFSLTFALLCCPFALGG

SEQ ID NO: 14905 - protein, 21 aa, Bos taurus
GRRNSMLMMNLLAFVSAVLMG

SEQ ID NO: 14906 - protein, 20 aa, Bos taurus
GVGYTAILISLYIGFFYNVI

SEQ ID NO: 14907 - protein, 20 aa, Bos taurus
ALAHFVWIAPLQVTLLMGLL

SEQ ID NO: 14908 - protein, 20 aa, Bos taurus
IKALLVANILSLVGALLMGF

SEQ ID NO: 14909 - protein, 20 aa, Bos taurus
KGTLLFNNIFSIVPALLMGF

SEQ ID NO: 14910 - protein, 20 aa, Bos taurus
LSLVLCALPFVAGFAVITAA

SEQ ID NO: 14911 - protein, 22 aa, Bos taurus
RRPLLVLASLGLLLQTVLSIFV

SEQ ID NO: 14912 - protein, 20 aa, Bos taurus
MLFNNALAVLGGTLMGLAKA

SEQ ID NO: 14913 - protein, 19 aa, Bos taurus
PESCLLIVVGLLVGGLIKG

SEQ ID NO: 14914 - protein, 25 aa, Bos taurus
ISALLIWGCLVTLGYVLVFDFDSPR

SEQ ID NO: 14915 - protein, 20 aa, Bos taurus
LTILGSTGPVLVFEKILFKF

SEQ ID NO: 14916 - protein, 20 aa, Bos taurus
PLTILSSTGPVLVFERLLFN

SEQ ID NO: 14917 - protein, 20 aa, Bos taurus
GIGYASIVIVSLLNIYYIII

SEQ ID NO: 14918 - protein, 25 aa, Bos taurus
IGCAICLIAFYIASYYNTIIAWALY

SEQ ID NO: 14919 - protein, 20 aa, Bos taurus
IVTLLNIYYIIVLAWALFYL

SEQ ID NO: 14920 - protein, 20 aa, Bos taurus
VCLLATTLTCASLGVLTAVA

SEQ ID NO: 14921 - protein, 30 aa, Bos taurus
GVGYAVILIALYVGFYYNVIIAWSLYYLFS

SEQ ID NO: 14922 - protein, 20 aa, Bos taurus
GNSMLIVNLLAIAGGCLMGF

SEQ ID NO: 14923 - protein, 20 aa, Bos taurus
IPMFTGFCIMFISTVMFAFS

SEQ ID NO: 14924 - protein, 20 aa, Bos taurus
GVGYGMMVVSTYIGIYYNVV

SEQ ID NO: 14925 - protein, 20 aa, Bos taurus
CLLISLSVNSVFAFFSSFVQ

SEQ ID NO: 14926 - protein, 20 aa, Bos taurus
AAIILSSCLLGLGSLVLIIS

SEQ ID NO: 14927 - protein, 20 aa, Bos taurus
LIFNYLQTAVSGTCAAFAPN

SEQ ID NO: 14928 - protein, 24 aa, Bos taurus
RLIGCGGIVMALGALLSALPEFLT

SEQ ID NO: 14929 - protein, 20 aa, Bos taurus
FGSVGFTFLLAAFALQWSTL

SEQ ID NO: 14930 - protein, 20 aa, Bos taurus
GIGFASCVVCFFVALYYNVI

SEQ ID NO: 14931 - protein, 20 aa, Bos taurus
LMAGEVSAMVGSAVWQLIAS

SEQ ID NO: 14932 - protein, 20 aa, Bos taurus
VIVFYCNTYYIMVLAWGFYY

SEQ ID NO: 14933 - protein, 23 aa, Bos taurus
LLLLQLLGWVFIPIYIRSGVYTM

SEQ ID NO: 14934 - protein, 20 aa, Bos taurus
LLGSACFAVSCLLIAYGASN

SEQ ID NO: 14935 - protein, 20 aa, Bos taurus
LVLWASSTGVFLFGIAAAFT

SEQ ID NO: 14936 - protein, 20 aa, Bos taurus
VMTGGILTALGMLLASFATS

SEQ ID NO: 14937 - protein, 20 aa, Bos taurus
VLWTLYYGILSAFAPVYSWI

SEQ ID NO: 14938 - protein, 20 aa, Bos taurus
TIIFSCFVCIGQVVFALGGI

SEQ ID NO: 14939 - protein, 20 aa, Bos taurus
FRVVNSAFTAVAILAVDFPL

SEQ ID NO: 14940 - protein, 20 aa, Bos taurus
LAIVGSDMQEVIGTAIAFSL

SEQ ID NO: 14941 - protein, 20 aa, Bos taurus
CCLLQLAITDTSAAFAPTYL

SEQ ID NO: 14942 - protein, 20 aa, Bos taurus
VGFNFLLAAFGIQWALLMQG

SEQ ID NO: 14943 - protein, 9 aa, Bos taurus
DTLALLNLF

SEQ ID NO: 14944 - protein, 20 aa, Bos taurus
PVMIVGGILSGSGLIAASFC

SEQ ID NO: 14945 - protein, 22 aa, Bos taurus
LTAGMLLSGLFTSLFGLGYFWN

SEQ ID NO: 14946 - protein, 20 aa, Bos taurus
FSGVGINLLIAALGLQWGTI

SEQ ID NO: 14947 - protein, 20 aa, Bos taurus
TASLSLSNLWFGFLLGFLCF

SEQ ID NO: 14948 - protein, 20 aa, Bos taurus
FLLGTVFFTCFPIPLMRISP

SEQ ID NO: 14949 - protein, 20 aa, Bos taurus
VSSLALGLASAASVSYIMFA

SEQ ID NO: 14950 - protein, 20 aa, Bos taurus
YLMCGGIAFWSLVTLGSSFI

SEQ ID NO: 14951 - protein, 20 aa, Bos taurus
ILYVCGLASTVLFGLVASSL

SEQ ID NO: 14952 - protein, 20 aa, Bos taurus
WVLSFGMCSSALVVFVFGTL

SEQ ID NO: 14953 - protein, 20 aa, Bos taurus
WFLDSFSIMSMSICLLTIFI

SEQ ID NO: 14954 - protein, 18 aa, Bos taurus
LFITMLISLQLFLIMTFT

SEQ ID NO: 14955 - protein, 17 aa, Bos taurus
AGAGLLAAAMIAVVPGY

SEQ ID NO: 14956 - protein, 20 aa, Bos taurus
FVLFFITYGLVIILTSELFL

SEQ ID NO: 14957 - protein, 19 aa, Bos taurus
LMSVTNAISGLTAVGGLVL

SEQ ID NO: 14958 - protein, 20 aa, Bos taurus
LNGLFFVLMLSWIFLPIYIT

SEQ ID NO: 14959 - protein, 20 aa, Bos taurus
VLLALAWVFVPIYLSSEIVT

SEQ ID NO: 14960 - protein, 20 aa, Bos taurus
MMFIPVALFVTWSIMEFSMW

SEQ ID NO: 14961 - protein, 20 aa, Bos taurus
FVAFFIGWNLILEYLIGTAA

SEQ ID NO: 14962 - protein, 20 aa, Bos taurus
IVVAATGMAVALFSSVLALG

SEQ ID NO: 14963 - protein, 20 aa, Bos taurus
LLLLLGAGGPLLYGLYSLGS

SEQ ID NO: 14964 - protein, 20 aa, Bos taurus
LLAPVFLVSPTLLGITMLLA

SEQ ID NO: 14965 - protein, 10 aa, Bos taurus
VTGSLETKYR

SEQ ID NO: 14966 - protein, 10 aa, Bos taurus
VTGTLETKYK

SEQ ID NO: 14967 - protein, 10 aa, Bos taurus
ASGNLETKYK

SEQ ID NO: 14968 - protein, 20 aa, Bos taurus
LAYMLVCMQWMDLLWAASFY

SEQ ID NO: 14969 - protein, 20 aa, Bos taurus
LFSIGMFPYVMLASSPLFCS

SEQ ID NO: 14970 - protein, 20 aa, Bos taurus
FGAGLTVGLSNLFCGVCVGI

SEQ ID NO: 14971 - protein, 20 aa, Bos taurus
YLSYLLYPLCIGGAIYSLLN

SEQ ID NO: 14972 - protein, 20 aa, Bos taurus
LFVVIIMFAWSIVASTAFLA

SEQ ID NO: 14973 - protein, 20 aa, Bos taurus
CYWQYLLSYVLAVGFMSFAV

SEQ ID NO: 14974 - protein, 20 aa, Bos taurus
LAALTLVVWLFAINVYFNAF

SEQ ID NO: 14975 - protein, 20 aa, Bos taurus
FVVFVLFAICWAPLNFIGLV

SEQ ID NO: 14976 - protein, 20 aa, Bos taurus
AVLGAFVTGLLMEFFMVYYV

SEQ ID NO: 14977 - protein, 20 aa, Bos taurus
GWALVDLLLTGGMAAATAMA

SEQ ID NO: 14978 - protein, 20 aa, Bos taurus
LFYIIGDLFIAGTDTTTNSL

SEQ ID NO: 14979 - protein, 28 aa, Bos taurus
ALQVLFQVVLIISGNLSFLNWLTIVPSL

SEQ ID NO: 14980 - protein, 20 aa, Bos taurus
SLCLALLCPAFLVGVVRVAE

SEQ ID NO: 14981 - protein, 20 aa, Bos taurus
WLVIVMTVMSLLVLVLSWGS

SEQ ID NO: 14982 - protein, 20 aa, Bos taurus
VPLMTLQLLDFCLSILTLCS

SEQ ID NO: 14983 - protein, 20 aa, Bos taurus
YLSWILFPLLGCYAVYSLLY

SEQ ID NO: 14984 - protein, 20 aa, Bos taurus
PIYVLPLVVTATMWGVLELG

SEQ ID NO: 14985 - protein, 19 aa, Bos taurus
YYVALAWTSSALMYFIVRS

SEQ ID NO: 14986 - protein, 20 aa, Bos taurus
FIGYLVGNTLWLVAVGYYIY

SEQ ID NO: 14987 - protein, 20 aa, Bos taurus
YLFTLTASAATMAVVSTVFL

SEQ ID NO: 14988 - protein, 20 aa, Bos taurus
FAVIFSLQGMVGIILTAGII

SEQ ID NO: 14989 - protein, 20 aa, Bos taurus
VVVSRILMAAPGMAIPPFIM

SEQ ID NO: 14990 - protein, 20 aa, Bos taurus
LPLLTGLFAISRLIYWLTFA

SEQ ID NO: 14991 - protein, 22 aa, Bos taurus
VVISRITMAAPGMILLPVLMER

SEQ ID NO: 14992 - protein, 20 aa, Bos taurus
ISILILQLLGYVLSVVGFSL

SEQ ID NO: 14993 - protein, 20 aa, Bos taurus
FGTVSALVIIGWCSLSASKI

SEQ ID NO: 14994 - protein, 20 aa, Bos taurus
FSLVAYTCLGAYVIMLCFLC

SEQ ID NO: 14995 - protein, 20 aa, Bos taurus
LFIINFVSFFTALAVYFRHN

SEQ ID NO: 14996 - protein, 20 aa, Bos taurus
APILNIPIVQFFFSVLIGLI

SEQ ID NO: 14997 - protein, 17 aa, Bos taurus
NWPYYFGFGLPLAFLTA

SEQ ID NO: 14998 - protein, 20 aa, Bos taurus
LVWAGLLGCARALGLGPKWL

SEQ ID NO: 14999 - protein, 17 aa, Bos taurus
VVLFGTSAFIPEVFAYF

SEQ ID NO: 15000 - protein, 20 aa, Bos taurus
FILSCGLVVVNHYLAFQFFA

SEQ ID NO: 15001 - protein, 20 aa, Bos taurus
LPSTGLMFFYHFSILQILGL

SEQ ID NO: 15002 - protein, 20 aa, Bos taurus
LVIHNLFEGMIWFIVPISCV

SEQ ID NO: 15003 - protein, 18 aa, Bos taurus
NVQLSLTLAALSLGLWWT

SEQ ID NO: 15004 - protein, 20 aa, Bos taurus
ALFFNFLSACCCYVGLGFGI

SEQ ID NO: 15005 - protein, 20 aa, Bos taurus
VVFFVFYIWSTVEIFRYPFY

SEQ ID NO: 15006 - protein, 22 aa, Bos taurus
ISSLFSSLKVVRLLRLGRVARK

SEQ ID NO: 15007 - protein, 20 aa, Bos taurus
AVTRLAGITGVVITLCLILI

SEQ ID NO: 15008 - protein, 20 aa, Bos taurus
AGHGLLVELIITFQLVFTIF

SEQ ID NO: 15009 - protein, 20 aa, Bos taurus
VSVQGIIIYRAAYFGVYDTA

SEQ ID NO: 15010 - protein, 20 aa, Bos taurus
VGQATIVEIFLTLQFVLCIF

SEQ ID NO: 15011 - protein, 16 aa, Bos taurus
PNLTRNVIINCTELVT

SEQ ID NO: 15012 - protein, 20 aa, Bos taurus
GILVFALFFAQWLVGFSFFL

SEQ ID NO: 15013 - protein, 19 aa, Bos taurus
GCIPTMARAVVVNAAQLAS

SEQ ID NO: 15014 - protein, 20 aa, Bos taurus
VSVQGIIIYRAAYFGIYDTA

SEQ ID NO: 15015 - protein, 15 aa, Bos taurus
IEIIGTLQLVLCVLA

SEQ ID NO: 15016 - protein, 20 aa, Bos taurus
GQAVTVELFLTLQLVLCIFA

SEQ ID NO: 15017 - protein, 21 aa, Bos taurus
YPEIRLNRLLRISRMFEFFQR

SEQ ID NO: 15018 - protein, 20 aa, Bos taurus
FAILRIIRLVRVFRIFKLSR

SEQ ID NO: 15019 - protein, 20 aa, Bos taurus
ILPTAFMGTAMIFTCFTLSA

SEQ ID NO: 15020 - protein, 17 aa, Bos taurus
AWPAPLFGLLFLLSSHL

SEQ ID NO: 15021 - protein, 22 aa, Bos taurus
VIRTTAYLLYSLHLNSCLYYWA

SEQ ID NO: 15022 - protein, 20 aa, Bos taurus
SFYSGHSSFGMYCMVFLALY

SEQ ID NO: 15023 - protein, 15 aa, Bos taurus
EDSVLLFVIAWTITE

SEQ ID NO: 15024 - protein, 20 aa, Bos taurus
SFFSGHASFSMYTMLYLVLY

SEQ ID NO: 15025 - protein, 20 aa, Bos taurus
QIIHHVATIILISFSWFANY

SEQ ID NO: 15026 - protein, 20 aa, Bos taurus
FFCTTFRKFIWVILQPLFYA

SEQ ID NO: 15027 - protein, 20 aa, Bos taurus
YWQTQFNNIAAVIVFFVWIK

SEQ ID NO: 15028 - protein, 20 aa, Bos taurus
FIMMLTLMMVAYSASSMALA

SEQ ID NO: 15029 - protein, 20 aa, Bos taurus
QVIHHFVTIILISFSYSLNL

SEQ ID NO: 15030 - protein, 20 aa, Bos taurus
VSVQGIIIYRAAYFGIYDTA

SEQ ID NO: 15031 - protein, 20 aa, Bos taurus
YILTSVLGLFAHELFYSILL

SEQ ID NO: 15032 - protein, 20 aa, Bos taurus
  MOD_RES 1: note = XXXXX
XLLICAMGLFVHEFFYSLLL

SEQ ID NO: 15033 - protein, 20 aa, Bos taurus
FWHGFDISGHSFLLTFCALM

SEQ ID NO: 15034 - protein, 20 aa, Bos taurus
LGITTVFLFACQWFLGFSVF

SEQ ID NO: 15035 - protein, 20 aa, Bos taurus
PMPLYAFLLAFIFCTYNGYL

SEQ ID NO: 15036 - protein, 20 aa, Bos taurus
MLAPCTGLGPAVFTCPLFFG

SEQ ID NO: 15037 - protein, 20 aa, Bos taurus
FLGMFLLVLFSFTIGLTQLY

SEQ ID NO: 15038 - protein, 22 aa, Bos taurus
FIILIVWLIAAVISLPPLIYKG

SEQ ID NO: 15039 - protein, 20 aa, Bos taurus
IPMLVIIETISLFIQPMALA

SEQ ID NO: 15040 - protein, 19 aa, Bos taurus
GVAPLWMRQIPYTMMKFAC

SEQ ID NO: 15041 - protein, 21 aa, Bos taurus
LRSLRFLQILRMLRMDRRGGT

SEQ ID NO: 15042 - protein, 20 aa, Bos taurus
MWHPTLVAEALFAIANIFSS

SEQ ID NO: 15043 - protein, 22 aa, Bos taurus
ISNLILYILIIIHWNACIYYAI

SEQ ID NO: 15044 - protein, 20 aa, Bos taurus
VNGFFDQFIGTASLIVCVLA

SEQ ID NO: 15045 - protein, 20 aa, Bos taurus
GAMLLTASIAVCANLLMAFV

SEQ ID NO: 15046 - protein, 20 aa, Bos taurus
VIGISYAVLTWFSQTLWMPI

SEQ ID NO: 15047 - protein, 20 aa, Bos taurus
LTASYAGISETIICFAIYES

SEQ ID NO: 15048 - protein, 18 aa, Bos taurus
WKMTLCLLVAWRIVGMAV

SEQ ID NO: 15049 - protein, 20 aa, Bos taurus
VSVQGIIVYRASYFGAYDTV

SEQ ID NO: 15050 - protein, 20 aa, Bos taurus
RRVVQIFRIMRILRILKLAR

SEQ ID NO: 15051 - protein, 20 aa, Bos taurus
VTLRVFRVFRIFKFSRHSQG

SEQ ID NO: 15052 - protein, 20 aa, Bos taurus
AGLLAVLWAGLQCSGGVGLL

SEQ ID NO: 15053 - protein, 14 aa, Bos taurus
IPLIMSVLYVWAQL

SEQ ID NO: 15054 - protein, 20 aa, Bos taurus
YVLVCMLGLFVHEFFYSFLL

SEQ ID NO: 15055 - protein, 20 aa, Bos taurus
HGVFNMVYFGFYFNVKNIIP

SEQ ID NO: 15056 - protein, 20 aa, Bos taurus
LLLVSILGFVVNLVGIFVFK

SEQ ID NO: 15057 - protein, 19 aa, Bos taurus
GYVPNLLGIIPYAGIDLAV

SEQ ID NO: 15058 - protein, 20 aa, Bos taurus
FLFSVSILSGILCSILAVLK

SEQ ID NO: 15059 - protein, 16 aa, Bos taurus
PNITRNAIVNCGEMVT

SEQ ID NO: 15060 - protein, 19 aa, Bos taurus
GLTATVLKQGSNQGIRFFV

SEQ ID NO: 15061 - protein, 20 aa, Bos taurus
GLMPTILGMAPYAGVSFFTF

SEQ ID NO: 15062 - protein, 17 aa, Bos taurus
FLSFSMYQSFVQFLQYY

SEQ ID NO: 15063 - protein, 20 aa, Bos taurus
GLGATLLRDVPFSIVYFPLF

SEQ ID NO: 15064 - protein, 19 aa, Bos taurus
GMVSTLLRETPSFGVYFLT

SEQ ID NO: 15065 - protein, 21 aa, Bos taurus
IVQVLRLLRALRMLKLGRHST

SEQ ID NO: 15066 - protein, 19 aa, Bos taurus
GYVPNMLGIIPYAGIDLAV

SEQ ID NO: 15067 - protein, 20 aa, Bos taurus
GRLLVGTFVALSFNLFTMLS

SEQ ID NO: 15068 - protein, 20 aa, Bos taurus
LWLGWGPTALRDVPFSALYW

SEQ ID NO: 15069 - protein, 20 aa, Bos taurus
ALLLNVASALTAFIGLYVAL

SEQ ID NO: 15070 - protein, 16 aa, Bos taurus
PNVARNAIVNCAELVT

SEQ ID NO: 15071 - protein, 20 aa, Bos taurus
FFAVHVCGAVLTFGMGSLYM

SEQ ID NO: 15072 - protein, 23 aa, Bos taurus
GLTATLLRDAPFSGIYLMFYSQT

SEQ ID NO: 15073 - protein, 20 aa, Bos taurus
IMLITAAIGVAVNVIMGFLL

SEQ ID NO: 15074 - protein, 20 aa, Bos taurus
VGTSLTFGFGTLTCWIQAAL

SEQ ID NO: 15075 - protein, 20 aa, Bos taurus
GWWVSHHYVSTFLSGVMLTW

SEQ ID NO: 15076 - protein, 20 aa, Bos taurus
RGYKSTVLREIPFSLVQFPL

SEQ ID NO: 15077 - protein, 20 aa, Bos taurus
LTGAFLAFFVGIVYFWLQLF

SEQ ID NO: 15078 - protein, 20 aa, Bos taurus
FADYVQCVLAFTGVAGYITY

SEQ ID NO: 15079 - protein, 21 aa, Bos taurus
WAPTILRDVPFSAMYWYNYEV

SEQ ID NO: 15080 - protein, 20 aa, Bos taurus
GPLMLAHHTLSILGIIVALV

SEQ ID NO: 15081 - protein, 20 aa, Bos taurus
VFYKGLNPTLIAIFPYAGFQ

SEQ ID NO: 15082 - protein, 30 aa, Bos taurus
ATWVPLLCFVLHVISWLLIFSILLVFDYAE

SEQ ID NO: 15083 - protein, 20 aa, Bos taurus
CLYFIPYVFLSDWITPEACA

SEQ ID NO: 15084 - protein, 21 aa, Bos taurus
VGGAVPRVMVGSAAQLATFAS

SEQ ID NO: 15085 - protein, 20 aa, Bos taurus
IDSNISLVHYIVASAQVWMI

SEQ ID NO: 15086 - protein, 20 aa, Bos taurus
IHSLLLYTVFGGALSLAVEV

SEQ ID NO: 15087 - protein, 20 aa, Bos taurus
FQLGAFLGSFVSIYKGTSCF

SEQ ID NO: 15088 - protein, 19 aa, Bos taurus
VTFLHVFHHTIMPWTWWFG

SEQ ID NO: 15089 - protein, 20 aa, Bos taurus
ASFICLAIWAMAIAGVAPLL

SEQ ID NO: 15090 - protein, 20 aa, Bos taurus
FRIAALLAFLGAAVAGSFPL

SEQ ID NO: 15091 - protein, 20 aa, Bos taurus
IWNTLLFLLTVQLVGLIKSS

SEQ ID NO: 15092 - protein, 20 aa, Bos taurus
YYYVAGYLFPATVVGVSAAI

SEQ ID NO: 15093 - protein, 20 aa, Bos taurus
FYLVGYGMPALIVAVSAAVD

SEQ ID NO: 15094 - protein, 20 aa, Bos taurus
YYYLGGYCFPALVVGIAAAI

SEQ ID NO: 15095 - protein, 23 aa, Bos taurus
VPLLNTSVLLASGVSITWAHHSL

SEQ ID NO: 15096 - protein, 20 aa, Bos taurus
AIMGVAFTWVMALACAAPPL

SEQ ID NO: 15097 - protein, 23 aa, Bos taurus
LMALLCVWALSLVISIGPLFGWR

SEQ ID NO: 15098 - protein, 20 aa, Bos taurus
VTVMIAIVWVLSFTISCPML

SEQ ID NO: 15099 - protein, 23 aa, Bos taurus
IVSIWILSFILAIPEAIGFVMVP

SEQ ID NO: 15100 - protein, 23 aa, Bos taurus
MLVAKVTCIIIWLLAGLASLPTI

SEQ ID NO: 15101 - protein, 19 aa, Bos taurus
VVYVGVWLPAVLLTIPDLI

SEQ ID NO: 15102 - protein, 24 aa, Bos taurus
AVEIVLIWVVSVVLAVPEAVGFDI

SEQ ID NO: 15103 - protein, 20 aa, Bos taurus
ASITILAAWFLSFLWIIPIL

SEQ ID NO: 15104 - protein, 17 aa, Bos taurus
FRVEFLVIPTAILAFLV

SEQ ID NO: 15105 - protein, 20 aa, Bos taurus
FLLVFLCTFMQIVICAIWLN

SEQ ID NO: 15106 - protein, 22 aa, Bos taurus
AGMMIAAAWVLSFILWAPAILF

SEQ ID NO: 15107 - protein, 19 aa, Bos taurus
IIAAIWVASILTSLLFITY

SEQ ID NO: 15108 - protein, 20 aa, Bos taurus
VLLAWAFSLLFSLPQLFIFA

SEQ ID NO: 15109 - protein, 21 aa, Bos taurus
AKIINICNWILSSAIGLPVMF

SEQ ID NO: 15110 - protein, 20 aa, Bos taurus
LVQKVGFFGILACASIPNPL

SEQ ID NO: 15111 - protein, 22 aa, Bos taurus
AYVIMLGGWVCCFLLALLPLVG

SEQ ID NO: 15112 - protein, 20 aa, Bos taurus
VVVVIVVIWTMAIVMGAIPS

SEQ ID NO: 15113 - protein, 23 aa, Bos taurus
RVVILMVWIVSGLTSFLPIQMHW

SEQ ID NO: 15114 - protein, 20 aa, Bos taurus
LWFWLEVNSVVDFFTVPPVF

SEQ ID NO: 15115 - protein, 23 aa, Bos taurus
IKAIIVTVWVISAVISFPPLISF

SEQ ID NO: 15116 - protein, 24 aa, Bos taurus
VTFGAATSVVTWVVAVFASLPGII

SEQ ID NO: 15117 - protein, 27 aa, Bos taurus
PKKQANIAIGVSLGIWLLILLLTIPLY

SEQ ID NO: 15118 - protein, 19 aa, Bos taurus
ITVLHVYHHASMLNIWWFV

SEQ ID NO: 15119 - protein, 20 aa, Bos taurus
YAFFKISLTLVGLFLIPDGI

SEQ ID NO: 15120 - protein, 21 aa, Bos taurus
FLLISACWVISLILGGLPIMG

SEQ ID NO: 15121 - protein, 20 aa, Bos taurus
LTCVAVWGLCLLFALPDFIF

SEQ ID NO: 15122 - protein, 23 aa, Bos taurus
AFLKIIAVWTISVGISMPIPVFG

SEQ ID NO: 15123 - protein, 24 aa, Bos taurus
AAFILISVAWTLSVLISFIPVQLS

SEQ ID NO: 15124 - protein, 20 aa, Bos taurus
YYGIGWGFPLLICIISIVFA

SEQ ID NO: 15125 - protein, 20 aa, Bos taurus
VTTSLGVWAAAILVATPQFM

SEQ ID NO: 15126 - protein, 19 aa, Bos taurus
WYYFLGWGFPLIPACIHAV

SEQ ID NO: 15127 - protein, 20 aa, Bos taurus
ISFLVLSWLFTLIALIMAAV

SEQ ID NO: 15128 - protein, 20 aa, Bos taurus
YTACLVIWVLAFFLSSPSLV

SEQ ID NO: 15129 - protein, 20 aa, Bos taurus
AVIAGIWLVALALAFPQCFY

SEQ ID NO: 15130 - protein, 20 aa, Bos taurus
LVILTVLWAGCTGSGITIVT

SEQ ID NO: 15131 - protein, 21 aa, Bos taurus
AVLLGVWLAVLAFALLPVLGV

SEQ ID NO: 15132 - protein, 21 aa, Bos taurus
CWVICFCVWVAAILLSIPQLV

SEQ ID NO: 15133 - protein, 22 aa, Bos taurus
AASIMLVGWIFAFAVALFPIFG

SEQ ID NO: 15134 - protein, 22 aa, Bos taurus
AGVMIGLAWVISFILWAPAILF

SEQ ID NO: 15135 - protein, 22 aa, Bos taurus
AAVVLVWVVSAAVSFAPIMSKW

SEQ ID NO: 15136 - protein, 20 aa, Bos taurus
LVFFVWLSSAFWAALPLLGW

SEQ ID NO: 15137 - protein, 21 aa, Bos taurus
NAVYISVLVWLIVVVGISPIL

SEQ ID NO: 15138 - protein, 23 aa, Bos taurus
ALMVVVATWTIGIGVSIPPFFGW

SEQ ID NO: 15139 - protein, 20 aa, Bos taurus
LAVLVTWLGCLVASAPQVHI

SEQ ID NO: 15140 - protein, 23 aa, Bos taurus
RARLALPAIYAFCTIFCSLPFLG

SEQ ID NO: 15141 - protein, 18 aa, Bos taurus
AYSFLPVQLLAAGMKEVT

SEQ ID NO: 15142 - protein, 20 aa, Bos taurus
LAVIWVGSMTLAAPELLLWQ

SEQ ID NO: 15143 - protein, 20 aa, Bos taurus
SVLLCLSITALVCLSVTVFS

SEQ ID NO: 15144 - protein, 22 aa, Bos taurus
ARGVIAALWVLAFGIGLTPFLG

SEQ ID NO: 15145 - protein, 20 aa, Bos taurus
YLWGFTVFGWGLPAIFVAVW

SEQ ID NO: 15146 - protein, 18 aa, Bos taurus
CICIFVWILVFGQTLPLL

SEQ ID NO: 15147 - protein, 20 aa, Bos taurus
AYVGIAVIWVLAVASSLPFL

SEQ ID NO: 15148 - protein, 20 aa, Bos taurus
LQFCIVKPIMALVTIVLQAF

SEQ ID NO: 15149 - protein, 19 aa, Bos taurus
FICLGIWALSVILALPIFI

SEQ ID NO: 15150 - protein, 22 aa, Bos taurus
AIPVMLGGWLFSTLIAVLPLVG

SEQ ID NO: 15151 - protein, 22 aa, Bos taurus
YIIIGWGTPTVCVSVWAMLRLY

SEQ ID NO: 15152 - protein, 22 aa, Bos taurus
KAKIINICIWILSSSVGISAIV

SEQ ID NO: 15153 - protein, 20 aa, Bos taurus
SAYAVLAIWALSAVLALPAA

SEQ ID NO: 15154 - protein, 23 aa, Bos taurus
RTYALLTCGLVWTTVFLYMLPFF

SEQ ID NO: 15155 - protein, 20 aa, Bos taurus
VTNSMVLVNILQAIYVLDFF

SEQ ID NO: 15156 - protein, 24 aa, Bos taurus
AGLTLFAVYASNVLFCALPSMGLG

SEQ ID NO: 15157 - protein, 20 aa, Bos taurus
LWLCLIGYGVPLIIVGISAG

SEQ ID NO: 15158 - protein, 19 aa, Bos taurus
MLLPLAFAATLTAFIFSLL

SEQ ID NO: 15159 - protein, 22 aa, Bos taurus
WTTVGLVWASALALGLLPLLGV

SEQ ID NO: 15160 - protein, 23 aa, Bos taurus
AITGIAFSWIWAAVWTAPPIFGW

SEQ ID NO: 15161 - protein, 20 aa, Bos taurus
VAITISAIWAACTVSGVLFI

SEQ ID NO: 15162 - protein, 23 aa, Bos taurus
ARARALVCTVWAISALVSFLPIF

SEQ ID NO: 15163 - protein, 21 aa, Bos taurus
GILLSLIIWVSIVGAASYFFV

SEQ ID NO: 15164 - protein, 20 aa, Bos taurus
HPYLGFIVMVLAVLQLLLAA

SEQ ID NO: 15165 - protein, 20 aa, Bos taurus
WFVMIATGWVKGSGVTLMSN

SEQ ID NO: 15166 - protein, 20 aa, Bos taurus
MVAPVVGAFCLAFCALPLVG

SEQ ID NO: 15167 - protein, 20 aa, Bos taurus
ICIILIWIYSCLIFLPSFFG

SEQ ID NO: 15168 - protein, 20 aa, Bos taurus
LQPVVKQVLYLLGAMLLSMA

SEQ ID NO: 15169 - protein, 20 aa, Bos taurus
AEVGPAGSQFGILACLFVEL

SEQ ID NO: 15170 - protein, 20 aa, Bos taurus
FLLIEDLTGSCFEPLPQGLL

SEQ ID NO: 15171 - protein, 20 aa, Bos taurus
ALLLLLLTAHVSYLSLIHFD

SEQ ID NO: 15172 - protein, 20 aa, Bos taurus
VKLLIGFVWVTSALVALPLL

SEQ ID NO: 15173 - protein, 20 aa, Bos taurus
MLAVILLVVFWFLVGWTSSV

SEQ ID NO: 15174 - protein, 20 aa, Bos taurus
IPIIFTCTGIVVVCTLLIFA

SEQ ID NO: 15175 - protein, 20 aa, Bos taurus
ATLALCALLAGTVAAVPLLG

SEQ ID NO: 15176 - protein, 20 aa, Bos taurus
LASAAVWAFSLVMSLPLVVF

SEQ ID NO: 15177 - protein, 20 aa, Bos taurus
AMGVSALIWVKELLTSIYFL

SEQ ID NO: 15178 - protein, 22 aa, Bos taurus
AVVAITGCWILSFVVGLTPMFG

SEQ ID NO: 15179 - protein, 19 aa, Bos taurus
LLSSIFAGPQLYIFGMIHL

SEQ ID NO: 15180 - protein, 19 aa, Bos taurus
INVAVWGVSLLVILPIMIY

SEQ ID NO: 15181 - protein, 18 aa, Bos taurus
VLALGTWLLALLLALPMM

SEQ ID NO: 15182 - protein, 23 aa, Bos taurus
GRRSGAIIGGIWAFCASCGTVFI

SEQ ID NO: 15183 - protein, 20 aa, Bos taurus
FLIIGLAWGVSALLASPLAI

SEQ ID NO: 15184 - protein, 18 aa, Bos taurus
AARVIVATWMLSGLLMVP

SEQ ID NO: 15185 - protein, 20 aa, Bos taurus
VGLFLVGLLLGLLLAAAALL

SEQ ID NO: 15186 - protein, 21 aa, Bos taurus
ARGSILGIWAVSLAVMVPQAA

SEQ ID NO: 15187 - protein, 20 aa, Bos taurus
VAGSIFISVLVWVTATLVTL

SEQ ID NO: 15188 - protein, 21 aa, Bos taurus
IWLALGLCWLVSFLVGLTPMF

SEQ ID NO: 15189 - protein, 20 aa, Bos taurus
IFGIVIPLQVLANVAYIVME

SEQ ID NO: 15190 - protein, 20 aa, Bos taurus
GAFVGASLLFLLVNVLCAML

SEQ ID NO: 15191 - protein, 20 aa, Bos taurus
AVAVSSVVWATELGANSAPL

SEQ ID NO: 15192 - protein, 17 aa, Bos taurus
FMAVYLSAGVISTFVSY

SEQ ID NO: 15193 - protein, 20 aa, Bos taurus
WVVAVASFAPLWPIYILVPV

SEQ ID NO: 15194 - protein, 17 aa, Bos taurus
FRVEFLVVPVGGLSFLV

SEQ ID NO: 15195 - protein, 20 aa, Bos taurus
IALLILAITIHNIPEGLAVG

SEQ ID NO: 15196 - protein, 20 aa, Bos taurus
IFLVALLLSLVEVIINTEWL

SEQ ID NO: 15197 - protein, 20 aa, Bos taurus
AVMVLAYIWLHSLIGCLPPL

SEQ ID NO: 15198 - protein, 20 aa, Bos taurus
AVIMAVGITTTVCFTVVIFS

SEQ ID NO: 15199 - protein, 20 aa, Bos taurus
LLSVLVWSLTLLIALPNMIL

SEQ ID NO: 15200 - protein, 20 aa, Bos taurus
VMACVGVWIMTLTTTIPLLL

SEQ ID NO: 15201 - protein, 20 aa, Bos taurus
AFGLTPLKPGLLLPLLLVSA

SEQ ID NO: 15202 - protein, 20 aa, Bos taurus
AGIWVMSVLLATPVLLYRTV

SEQ ID NO: 15203 - protein, 20 aa, Bos taurus
MISAVVWLMVLLIMVPNMII

SEQ ID NO: 15204 - protein, 20 aa, Bos taurus
VARLLCLGVWALILVFAVPT

SEQ ID NO: 15205 - protein, 20 aa, Bos taurus
ILGIVWGLSVLFSLPNTSIH

SEQ ID NO: 15206 - protein, 20 aa, Bos taurus
FSLGIAAFLPQFILLSAVSF

SEQ ID NO: 15207 - protein, 20 aa, Bos taurus
VLLISKLSCLGIWMLAIVLS

SEQ ID NO: 15208 - protein, 20 aa, Bos taurus
LALLLTWAAPLLFASLPALG

SEQ ID NO: 15209 - protein, 22 aa, Bos taurus
ASLCVWLGVTVAVLPFLTFAGV

SEQ ID NO: 15210 - protein, 19 aa, Bos taurus
VSLAVWGVATLVVLPFAVF

SEQ ID NO: 15211 - protein, 20 aa, Bos taurus
FLIALVWMVSILISIPSAYF

SEQ ID NO: 15212 - protein, 20 aa, Bos taurus
TGLIALVWVVSILVAIPSAY

SEQ ID NO: 15213 - protein, 20 aa, Bos taurus
LGVTVGLWGVAALLSLPVVL

SEQ ID NO: 15214 - protein, 20 aa, Bos taurus
LQFCVVKPLMAVSTVVLQAF

SEQ ID NO: 15215 - protein, 23 aa, Bos taurus
IIIFVWAFTSIYCMLWFFLLDLN

SEQ ID NO: 15216 - protein, 22 aa, Bos taurus
KMMLSGVCFFAVFVALLPILGH

SEQ ID NO: 15217 - protein, 20 aa, Bos taurus
FWLLVFMPLFFVSPVSVAAC

SEQ ID NO: 15218 - protein, 20 aa, Bos taurus
VSGLLKIVQAFVACIIFGAL

SEQ ID NO: 15219 - protein, 20 aa, Bos taurus
VLQYTVVRPFTTIIALVCEL

SEQ ID NO: 15220 - protein, 20 aa, Bos taurus
FYIVGLPLAVGLGVLLVAAV

SEQ ID NO: 15221 - protein, 20 aa, Bos taurus
FVHGMLMFAVTHMLYASAFG

SEQ ID NO: 15222 - protein, 20 aa, Bos taurus
CAAVICMAWTLSVAMAFPPV

SEQ ID NO: 15223 - protein, 20 aa, Bos taurus
VLDQWLTLPIFAWPVAWCLC

SEQ ID NO: 15224 - protein, 25 aa, Bos taurus
ALPFFLLLVDLSRASALAKFALSSN

SEQ ID NO: 15225 - protein, 20 aa, Bos taurus
FFAFHFILPFIIMAIAMVHL

SEQ ID NO: 15226 - protein, 20 aa, Bos taurus
LAIILLSVLLMSGSFTLSTL

SEQ ID NO: 15227 - protein, 23 aa, Bos taurus
SVNGVNALGLVVFSMCFGFVIGN

SEQ ID NO: 15228 - protein, 20 aa, Bos taurus
IVGTILLITSLLILCTCLIL

SEQ ID NO: 15229 - protein, 19 aa, Bos taurus
FKMKMSVILGIIHMLFGVS

SEQ ID NO: 15230 - protein, 20 aa, Bos taurus
FWWLLFPVSAMSMTCPVFSS

SEQ ID NO: 15231 - protein, 23 aa, Bos taurus
YSDGINVLGLIVFCLVLGIVIGR

SEQ ID NO: 15232 - protein, 20 aa, Bos taurus
YPTLFLTVWNFGAVGMVCIH

SEQ ID NO: 15233 - protein, 20 aa, Bos taurus
GGEIFPYLVVVIGLENVLVL

SEQ ID NO: 15234 - protein, 19 aa, Bos taurus
FKMKMSVILGITHMTFGVI

SEQ ID NO: 15235 - protein, 20 aa, Bos taurus
EIQIALVIVFVLSTFGGATM

SEQ ID NO: 15236 - protein, 23 aa, Bos taurus
EVEGMNILGLVVFAIIFGVALRK

SEQ ID NO: 15237 - protein, 20 aa, Bos taurus
LFELWNMLDFGMLAIFAASF

SEQ ID NO: 15238 - protein, 20 aa, Bos taurus
LEGYVFILINDVLTAANGAY

SEQ ID NO: 15239 - protein, 20 aa, Bos taurus
AALLSVTSLFYILSIIFAGL

SEQ ID NO: 15240 - protein, 20 aa, Bos taurus
QLGLWVIAGFLTFLVLEKLF

SEQ ID NO: 15241 - protein, 20 aa, Bos taurus
VATTGTAVCINFCIIMLLNV

SEQ ID NO: 15242 - protein, 22 aa, Bos taurus
VAFYNVGRSLTTVFNVLLSYLL

SEQ ID NO: 15243 - protein, 20 aa, Bos taurus
GVGYQMLGNIVTIGLAFFPF

SEQ ID NO: 15244 - protein, 20 aa, Bos taurus
LGLIGGIHGFFLIEKCFTLL

SEQ ID NO: 15245 - protein, 20 aa, Bos taurus
ITYWPQLALGLTFNWGALLG

SEQ ID NO: 15246 - protein, 20 aa, Bos taurus
ACVLVFSLALHSVFEGLAVG

SEQ ID NO: 15247 - protein, 20 aa, Bos taurus
LLSLVFALSAHSVFEGLALG

SEQ ID NO: 15248 - protein, 20 aa, Bos taurus
FVGLMAVLTACFSSGFAGVY

SEQ ID NO: 15249 - protein, 20 aa, Bos taurus
YPMAKYLCVLLIVAGVALFM

SEQ ID NO: 15250 - protein, 20 aa, Bos taurus
GFVSVYLSDALLGGFVTGAS

SEQ ID NO: 15251 - protein, 20 aa, Bos taurus
LMTFQMKFFYISQLAYWFHA

SEQ ID NO: 15252 - protein, 20 aa, Bos taurus
LLGFAIVSTVITAVLLILIY

SEQ ID NO: 15253 - protein, 20 aa, Bos taurus
QGLALLLLMAAGACYAAGGL

SEQ ID NO: 15254 - protein, 20 aa, Bos taurus
LGSALVLYCASLWTSLSLLL

SEQ ID NO: 15255 - protein, 20 aa, Bos taurus
VSKILGTLLFIAIPIAAGVV

SEQ ID NO: 15256 - protein, 20 aa, Bos taurus
SVLNLLFLGYPFGVYVPLCC

SEQ ID NO: 15257 - protein, 20 aa, Bos taurus
TYSFLNLLFLCYPFGMYIPF

SEQ ID NO: 15258 - protein, 20 aa, Bos taurus
YSRTVAIIGGFLVLASGAGE

SEQ ID NO: 15259 - protein, 20 aa, Bos taurus
EIEGMNILGLVLFALVLGVA

SEQ ID NO: 15260 - protein, 20 aa, Bos taurus
TMAALGMMPLCLYLYTLSWN

SEQ ID NO: 15261 - protein, 20 aa, Bos taurus
HGAAHLLGSLLSWAHLGVQV

SEQ ID NO: 15262 - protein, 20 aa, Bos taurus
FRCLNVMLWLGFWVVQLNVC

SEQ ID NO: 15263 - protein, 31 aa, Bos taurus
VGSVLALMVYTILFLKLFSYRDVNLWCRERR

SEQ ID NO: 15264 - protein, 21 aa, Bos taurus
YISVALLIWNFGVVGMIAIHW

SEQ ID NO: 15265 - protein, 20 aa, Bos taurus
LGFVVICALLLLVGAFVPLN

SEQ ID NO: 15266 - protein, 20 aa, Bos taurus
VWNIILTTSLFSVPFFLTWS

SEQ ID NO: 15267 - protein, 20 aa, Bos taurus
ATLYPGVVFGICFVLNCFIW

SEQ ID NO: 15268 - protein, 21 aa, Bos taurus
WVRVIPSLAYCTFLLAVGLSR

SEQ ID NO: 15269 - protein, 20 aa, Bos taurus
LVALAFIIRPTAVIPWIPLL

SEQ ID NO: 15270 - protein, 20 aa, Bos taurus
GLCWTISITWELTELFFMHL

SEQ ID NO: 15271 - protein, 20 aa, Bos taurus
CLLWLTFMYFFWKLGDPFPI

SEQ ID NO: 15272 - protein, 20 aa, Bos taurus
MICYWDGSAHYLMYLVMVAA

SEQ ID NO: 15273 - protein, 20 aa, Bos taurus
LNLHGKIGCLLSILGSTVMV

SEQ ID NO: 15274 - protein, 17 aa, Bos taurus
VIFLIGIIVANVPEGLL

SEQ ID NO: 15275 - protein, 20 aa, Bos taurus
TFIILYNNLIPISLLVTLEV

SEQ ID NO: 15276 - protein, 20 aa, Bos taurus
FFIIGVTVLVVAVPEGLPLA

SEQ ID NO: 15277 - protein, 20 aa, Bos taurus
FVTAAWSIFAYTWLYIILSV

SEQ ID NO: 15278 - protein, 17 aa, Bos taurus
FTISVSLAVAAIPEGLP

SEQ ID NO: 15279 - protein, 17 aa, Bos taurus
VIFLIGIIVANVPEGLL

SEQ ID NO: 15280 - protein, 17 aa, Bos taurus
FKIAVALAVAAIPEGLP

SEQ ID NO: 15281 - protein, 21 aa, Bos taurus
LTFIILFNNLIPISLLVTLEV

SEQ ID NO: 15282 - protein, 19 aa, Bos taurus
WTMPHCVLTLKLIGLAMDY

SEQ ID NO: 15283 - protein, 20 aa, Bos taurus
SLFRFLLLFSYIIPISLRVN

SEQ ID NO: 15284 - protein, 20 aa, Bos taurus
LAALIILAVLEGVLLLMLIF

SEQ ID NO: 15285 - protein, 24 aa, Bos taurus
VVVPGINLPVNQLTYFFAAVLISG

SEQ ID NO: 15286 - protein, 17 aa, Bos taurus
EGPMIHSGSVIAAGISQ

SEQ ID NO: 15287 - protein, 21 aa, Bos taurus
WRHKLLLPTAASLPLLMVYFT

SEQ ID NO: 15288 - protein, 20 aa, Bos taurus
VAFMIILSIVEVIIILLLIF

SEQ ID NO: 15289 - protein, 22 aa, Bos taurus
PAMAVIFSNFSIITTALLFRIV

SEQ ID NO: 15290 - protein, 22 aa, Bos taurus
GVSVFVLYLLLWVVLFSFILSH

SEQ ID NO: 15291 - protein, 20 aa, Bos taurus
AGICLLIIIQLFVAGLIVLL

SEQ ID NO: 15292 - protein, 20 aa, Bos taurus
FIFYIFGSIGCVCCLLWFTV

SEQ ID NO: 15293 - protein, 20 aa, Bos taurus
WFYVGMAGAFCFILIQLVLL

SEQ ID NO: 15294 - protein, 20 aa, Bos taurus
AGVCLLITIQLFVAGLIVLL

SEQ ID NO: 15295 - protein, 20 aa, Bos taurus
IGTYQLAKAMTTPVIIVIQT

SEQ ID NO: 15296 - protein, 20 aa, Bos taurus
AIVNILSSTSGLFTLILAAM

SEQ ID NO: 15297 - protein, 22 aa, Bos taurus
LGILIWGSFNALTGWASSRFGW

SEQ ID NO: 15298 - protein, 20 aa, Bos taurus
LVLFLHEAVLVQYMDTLKLA

SEQ ID NO: 15299 - protein, 20 aa, Bos taurus
MLMTMALAMKLGMAPFHFWV

SEQ ID NO: 15300 - protein, 20 aa, Bos taurus
FYIFDLMMLILFFLDSLIAW

SEQ ID NO: 15301 - protein, 20 aa, Bos taurus
LWYLNGDYLVLLVSLVLILP

SEQ ID NO: 15302 - protein, 20 aa, Bos taurus
LTGIIQLSMGMLGFGFIVAY

SEQ ID NO: 15303 - protein, 20 aa, Bos taurus
FLKGNLLIIIVSVLIILPLA

SEQ ID NO: 15304 - protein, 20 aa, Bos taurus
HSFFTITITCMAILSGTSTI

SEQ ID NO: 15305 - protein, 20 aa, Bos taurus
WDSLLLETGFLAMLVAPLGL

SEQ ID NO: 15306 - protein, 20 aa, Bos taurus
FTISLTAFLFILPLSIPREI

SEQ ID NO: 15307 - protein, 20 aa, Bos taurus
GAFLFAVLLHFKHIYLYVAP

SEQ ID NO: 15308 - protein, 20 aa, Bos taurus
AVLLFLAMPMLAVGGILFLI

SEQ ID NO: 15309 - protein, 20 aa, Bos taurus
VALAGELVGVGGHFLFLGLA

SEQ ID NO: 15310 - protein, 20 aa, Bos taurus
FISCPVIKGFTSAAAIIIGF

SEQ ID NO: 15311 - protein, 20 aa, Bos taurus
IAFLVLTFFLALVDCTSSVT

SEQ ID NO: 15312 - protein, 20 aa, Bos taurus
FYASWYTLIPASVLVGLGAA

SEQ ID NO: 15313 - protein, 20 aa, Bos taurus
IIDFLFGVVSGLTGLSSGYF

SEQ ID NO: 15314 - protein, 20 aa, Bos taurus
VIGGISKGNVSLCTAIVADL

SEQ ID NO: 15315 - protein, 20 aa, Bos taurus
GFLTLVDLHHHALLADLALS

SEQ ID NO: 15316 - protein, 20 aa, Bos taurus
GFWFFKFLIFVGITVGAFYI

SEQ ID NO: 15317 - protein, 20 aa, Bos taurus
LLIGRHLIIVLSTVVFTLPL

SEQ ID NO: 15318 - protein, 20 aa, Bos taurus
GCVIFVRILQGLVEGVTYPA

SEQ ID NO: 15319 - protein, 20 aa, Bos taurus
GCVIFVRILQGLVEGVTYPA

SEQ ID NO: 15320 - protein, 20 aa, Bos taurus
CAPAVLSALALVGLGVGAVK

SEQ ID NO: 15321 - protein, 29 aa, Bos taurus
ASVDLTIFSLHLAGVSSILGAINFITTII

SEQ ID NO: 15322 - protein, 20 aa, Bos taurus
AAAVPATADQGVWQLLLVTF

SEQ ID NO: 15323 - protein, 23 aa, Bos taurus
MLILGRFIIGVYCGLTTGFVPMY

SEQ ID NO: 15324 - protein, 18 aa, Bos taurus
WQLTSCLVLVIVLLYFSL

SEQ ID NO: 15325 - protein, 20 aa, Bos taurus
TFCGLAFLIVLALLQAGLGK

SEQ ID NO: 15326 - protein, 20 aa, Bos taurus
ISGLYCGLISGLIPMYIGEI

SEQ ID NO: 15327 - protein, 22 aa, Bos taurus
MIIVARVLVGICAGLSSNVVPM

SEQ ID NO: 15328 - protein, 20 aa, Bos taurus
LLTGLACGIASLVAPVYISE

SEQ ID NO: 15329 - protein, 13 aa, Bos taurus
IGYLVLGRILCAL

SEQ ID NO: 15330 - protein, 20 aa, Bos taurus
FFIGAYSGLTSGLVPMYVGE

SEQ ID NO: 15331 - protein, 19 aa, Bos taurus
ILQSEVFFLFLLPPIILDA

SEQ ID NO: 15332 - protein, 20 aa, Bos taurus
LWGRCPSSSFVVFVVYTLLP

SEQ ID NO: 15333 - protein, 20 aa, Bos taurus
IGLWTATLCIILVATDASSL

SEQ ID NO: 15334 - protein, 20 aa, Bos taurus
LEFRLWIGLWSAFLCLILVA

SEQ ID NO: 15335 - protein, 18 aa, Bos taurus
WDLALCLLLVWLVCFFCI

SEQ ID NO: 15336 - protein, 18 aa, Bos taurus
WQLVLCIMFIFTVIYFSI

SEQ ID NO: 15337 - protein, 20 aa, Bos taurus
ELALCLLLAWVVCYFCIWKG

SEQ ID NO: 15338 - protein, 22 aa, Bos taurus
LLIFRLLQGLVSKGSWTAGYTL

SEQ ID NO: 15339 - protein, 20 aa, Bos taurus
QWQLLLCLIIVVIVLFFSLW

SEQ ID NO: 15340 - protein, 23 aa, Bos taurus
MLILGRLIIGLFCGLCTGFVPMY

SEQ ID NO: 15341 - protein, 20 aa, Bos taurus
SLQGIGSSCSSVAGMGMLAS

SEQ ID NO: 15342 - protein, 18 aa, Bos taurus
LPLLGCLGVSWVVVFLCL

SEQ ID NO: 15343 - protein, 20 aa, Bos taurus
LLSGVGIGGSIPIVFSYFSE

SEQ ID NO: 15344 - protein, 20 aa, Bos taurus
IAIGVFISLSSTATCVYIAE

SEQ ID NO: 15345 - protein, 20 aa, Bos taurus
GMSTAGVVLNCMTLNVEWMP

SEQ ID NO: 15346 - protein, 28 aa, Bos taurus
MMYLLLIGAQVLLGIGATPVQPLGVSYI

SEQ ID NO: 15347 - protein, 20 aa, Bos taurus
SMINADFCAGAVLISFGAVL

SEQ ID NO: 15348 - protein, 18 aa, Bos taurus
WKMTICLLAAWVVVCLAM

SEQ ID NO: 15349 - protein, 20 aa, Bos taurus
FPISGTHCIVGATIGFSLVA

SEQ ID NO: 15350 - protein, 20 aa, Bos taurus
LNWEVTLCLLTCWVLVYFCV

SEQ ID NO: 15351 - protein, 20 aa, Bos taurus
VYFAALSLILYIFTKLSVDL

SEQ ID NO: 15352 - protein, 20 aa, Bos taurus
LSVLIFIALALNGFGGMCMT

SEQ ID NO: 15353 - protein, 20 aa, Bos taurus
FIVARFLLAISGSGYLVVVF

SEQ ID NO: 15354 - protein, 20 aa, Bos taurus
LYLSIGLLSGSGWALTFTPT

SEQ ID NO: 15355 - protein, 20 aa, Bos taurus
GLVGFGIGGVPQSVTLYAEF

SEQ ID NO: 15356 - protein, 20 aa, Bos taurus
AFWLMELGRFVFGIGGESLA

SEQ ID NO: 15357 - protein, 20 aa, Bos taurus
LYGTGAMDYGVGGFIFGSAM

SEQ ID NO: 15358 - protein, 19 aa, Bos taurus
IPLWGGVLITVVDTFFFLF

SEQ ID NO: 15359 - protein, 20 aa, Bos taurus
FLAGFSTMSILTNCTVLIVE

SEQ ID NO: 15360 - protein, 19 aa, Bos taurus
LINADFCVGSVCVAFGAVL

SEQ ID NO: 15361 - protein, 21 aa, Bos taurus
GIFLFCMCVIAIGAVQALIVL

SEQ ID NO: 15362 - protein, 20 aa, Bos taurus
LYFSVGVIGGLGLAFNLNPA

SEQ ID NO: 15363 - protein, 22 aa, Bos taurus
VLWYFVLVQIFNGLVQTTGWPA

SEQ ID NO: 15364 - protein, 20 aa, Bos taurus
VTVLISFGAVLGKTSPVQML

SEQ ID NO: 15365 - protein, 20 aa, Bos taurus
PTLLTTVEFLELVGFAIAST

SEQ ID NO: 15366 - protein, 20 aa, Bos taurus
FAMISISGVFSVTFSVIFAY

SEQ ID NO: 15367 - protein, 20 aa, Bos taurus
LTGMALAGFTIIVMPLELEW

SEQ ID NO: 15368 - protein, 20 aa, Bos taurus
VGVGEASYSTIAPTLIADLF

SEQ ID NO: 15369 - protein, 20 aa, Bos taurus
FVLLVGRALGGLSTALLFSA

SEQ ID NO: 15370 - protein, 20 aa, Bos taurus
LWIVNGLLQSTGWPCVVAVM

SEQ ID NO: 15371 - protein, 20 aa, Bos taurus
FILFLFLLAFSIATIMQCFL

SEQ ID NO: 15372 - protein, 22 aa, Bos taurus
ILFYILFEATLVPTLIIITRWG

SEQ ID NO: 15373 - protein, 19 aa, Bos taurus
GIAIFCMLLTYYMWIKAVK

SEQ ID NO: 15374 - protein, 20 aa, Bos taurus
VIYIVQTILYTGVVVYAPAL

SEQ ID NO: 15375 - protein, 20 aa, Bos taurus
GLAALATFISSVNIAGGFLV

SEQ ID NO: 15376 - protein, 20 aa, Bos taurus
IPIILAVLYLFIYIFTKISV

SEQ ID NO: 15377 - protein, 22 aa, Bos taurus
VLSLLLSVFTKISIDLYAGALF

SEQ ID NO: 15378 - protein, 20 aa, Bos taurus
FFKYLLLFLITMLILVTANN

SEQ ID NO: 15379 - protein, 20 aa, Bos taurus
YPDLLALVIAIIVTIIVALG

SEQ ID NO: 15380 - protein, 20 aa, Bos taurus
PVPTNTCVISGLAGGVIIYI

SEQ ID NO: 15381 - protein, 20 aa, Bos taurus
GLDYFNSLWIWTLVVGYVLA

SEQ ID NO: 15382 - protein, 20 aa, Bos taurus
SSGIMLTFWLIALLCALAIL

SEQ ID NO: 15383 - protein, 7 aa, Bos taurus
LTFTEKW

SEQ ID NO: 15384 - protein, 7 aa, Bos taurus
LTFTEKW

SEQ ID NO: 15385 - protein, 7 aa, Bos taurus
LTFTQKW

SEQ ID NO: 15386 - protein, 20 aa, Bos taurus
GFIGGFFATVVFGLLLSYVM

SEQ ID NO: 15387 - protein, 21 aa, Bos taurus
GLGLGITIAFLATLITQLLVY

SEQ ID NO: 15388 - protein, 20 aa, Bos taurus
ANWIFALAGGMFLYISLADM

SEQ ID NO: 15389 - protein, 20 aa, Bos taurus
VWIPLYPMGCLAEAVSVIQS

SEQ ID NO: 15390 - protein, 21 aa, Bos taurus
VLVLLVCVFGLAAHWMACIWY

SEQ ID NO: 15391 - protein, 20 aa, Bos taurus
YFEVFWYTHHLFVIFFIGLA

SEQ ID NO: 15392 - protein, 20 aa, Bos taurus
VTGSIALAIGISVAIGHLFA

SEQ ID NO: 15393 - protein, 20 aa, Bos taurus
IVSWMIAQTVTAVAGLVSYP

SEQ ID NO: 15394 - protein, 16 aa, Bos taurus
VALAVGFSLTLGHLFG

SEQ ID NO: 15395 - protein, 19 aa, Bos taurus
PCHFVSAVVAGFCTTVLSS

SEQ ID NO: 15396 - protein, 20 aa, Bos taurus
QHVFFGAAIFLLSVATALLG

SEQ ID NO: 15397 - protein, 18 aa, Bos taurus
HFCASMISGLVTTAASMP

SEQ ID NO: 15398 - protein, 20 aa, Bos taurus
VVSWMIAQTVTAVAGVVSYP

SEQ ID NO: 15399 - protein, 17 aa, Bos taurus
GPLAIGFSVALGHLLAI

SEQ ID NO: 15400 - protein, 19 aa, Bos taurus
VGTPALSIGFSVALGHLLG

SEQ ID NO: 15401 - protein, 26 aa, Bos taurus
ISNLVMYIIIIIHWNACVYFSISKAI

SEQ ID NO: 15402 - protein, 21 aa, Bos taurus
RELGLLIFFLFIGVILFSSAV

SEQ ID NO: 15403 - protein, 20 aa, Bos taurus
YLFLGGILMSAMSLMLLSSL

SEQ ID NO: 15404 - protein, 29 aa, Bos taurus
FYMIPVFFAFRMRFYVAWIAAECGCIAAG

SEQ ID NO: 15405 - protein, 19 aa, Bos taurus
IVFQGLNYFTGVFAFSVMI

SEQ ID NO: 15406 - protein, 17 aa, Bos taurus
LRPTVQFFLVAFALYVG

SEQ ID NO: 15407 - protein, 17 aa, Bos taurus
TLFIVLYPMGVSGELLT

SEQ ID NO: 15408 - protein, 17 aa, Bos taurus
LRPLLQFTLIMMAFYTG

SEQ ID NO: 15409 - protein, 20 aa, Bos taurus
IFIVFAIVFIITRLVILPFW

SEQ ID NO: 15410 - protein, 20 aa, Bos taurus
YLEIINTVIQITFDIVVYYV

SEQ ID NO: 15411 - protein, 21 aa, Bos taurus
FGFAIMFFIIFLAYAQLAYLV

SEQ ID NO: 15412 - protein, 20 aa, Bos taurus
IATLLMTISFVFMMIFSGLL

SEQ ID NO: 15413 - protein, 20 aa, Bos taurus
MCDTLFIIFSLVFFYTRLVL

SEQ ID NO: 15414 - protein, 20 aa, Bos taurus
FISWMIAQSVTAVAGLTSYP

SEQ ID NO: 15415 - protein, 20 aa, Bos taurus
ILLTALLALILVYLFSIVGF

SEQ ID NO: 15416 - protein, 20 aa, Bos taurus
IILMAVLALILVYLFSIVGY

SEQ ID NO: 15417 - protein, 20 aa, Bos taurus
LVVALGFLTFIWVWMFLCTA

SEQ ID NO: 15418 - protein, 20 aa, Bos taurus
IHVFFGASILSLAIASVVSG

SEQ ID NO: 15419 - protein, 20 aa, Bos taurus
FLTGSALWLIGMLINIHSDH

SEQ ID NO: 15420 - protein, 20 aa, Bos taurus
LIGPVLCHSFCNYMGFPAVC

SEQ ID NO: 15421 - protein, 20 aa, Bos taurus
FIGTCFALFWYIFSLAHVAI

SEQ ID NO: 15422 - protein, 23 aa, Bos taurus
AWYILASSIGSFFAPCLIMILVY

SEQ ID NO: 15423 - protein, 20 aa, Bos taurus
ITAGHLLIHLIGGATLALMS

SEQ ID NO: 15424 - protein, 22 aa, Bos taurus
QLVVTFVAGYIAGVFCAIVSHP

SEQ ID NO: 15425 - protein, 20 aa, Bos taurus
ITAWYIGFLTLILSSFLVYL

SEQ ID NO: 15426 - protein, 20 aa, Bos taurus
MLLDILKFLFIYCLVLLAFA

SEQ ID NO: 15427 - protein, 19 aa, Bos taurus
YLFVIFDFLIGVLIFATIV

SEQ ID NO: 15428 - protein, 19 aa, Bos taurus
GLEAFTVGLVVLVIGTSMG

SEQ ID NO: 15429 - protein, 20 aa, Bos taurus
FVHVLGDLLQSLGVLIASIL

SEQ ID NO: 15430 - protein, 20 aa, Bos taurus
LCVLAEAFTIYQSLPYFESF

SEQ ID NO: 15431 - protein, 20 aa, Bos taurus
FFGLMAAAALSKGCASCVAY

SEQ ID NO: 15432 - protein, 17 aa, Bos taurus
VMYFSSLFPYVVLACFL

SEQ ID NO: 15433 - protein, 20 aa, Bos taurus
LVSFFIAQVVTTCSGILSYP

SEQ ID NO: 15434 - protein, 21 aa, Bos taurus
NELGLLILFLAMGIMIFSSLV

SEQ ID NO: 15435 - protein, 20 aa, Bos taurus
LGFLLFSLTMAIIIFATVMF

SEQ ID NO: 15436 - protein, 20 aa, Bos taurus
GLVGYLLGGASLLLGMCSLW

SEQ ID NO: 15437 - protein, 11 aa, Bos taurus
LPWVILGFNYI

SEQ ID NO: 15438 - protein, 20 aa, Bos taurus
IILTAVLALILVYLFSIIGF

SEQ ID NO: 15439 - protein, 20 aa, Bos taurus
FGIGLLSGTIASVINIPFDV

SEQ ID NO: 15440 - protein, 20 aa, Bos taurus
VFLHILADTLGSIGVIASAI

SEQ ID NO: 15441 - protein, 17 aa, Bos taurus
LGCGALSSTCGQLASYP

SEQ ID NO: 15442 - protein, 20 aa, Bos taurus
ALITDGFNSLVGGVMGFSIL

SEQ ID NO: 15443 - protein, 19 aa, Bos taurus
PCHFVSAFGAGFCATLVAS

SEQ ID NO: 15444 - protein, 17 aa, Bos taurus
GVFGAIAGAASVFGNTP

SEQ ID NO: 15445 - protein, 20 aa, Bos taurus
LLCGGVAGAIAQTISYPFDV

SEQ ID NO: 15446 - protein, 20 aa, Bos taurus
FLLPFLFFGHFWQLFNALTL

SEQ ID NO: 15447 - protein, 20 aa, Bos taurus
SPFYVSFLAGCVAGSAAAVA

SEQ ID NO: 15448 - protein, 20 aa, Bos taurus
LLVPKLLLAGGTSGIASWLS

SEQ ID NO: 15449 - protein, 20 aa, Bos taurus
VGLLLLFLSVGISIFSTVEY

SEQ ID NO: 15450 - protein, 17 aa, Bos taurus
LACGTMSSTCGQLASYP

SEQ ID NO: 15451 - protein, 20 aa, Bos taurus
FVLIDLAGAFALCITYMLIE

SEQ ID NO: 15452 - protein, 20 aa, Bos taurus
GISFVAGGISGMVAATLTLP

SEQ ID NO: 15453 - protein, 20 aa, Bos taurus
WILAVAAGLFLYVALCDMLP

SEQ ID NO: 15454 - protein, 19 aa, Bos taurus
PCHFTSAFGAGFCTTVIAS

SEQ ID NO: 15455 - protein, 20 aa, Bos taurus
LLLVIWCGVSAFSMLTCSSL

SEQ ID NO: 15456 - protein, 26 aa, Bos taurus
VNFSCGIFAGILASLVTQPADVIKTH

SEQ ID NO: 15457 - protein, 20 aa, Bos taurus
FVHALGDLVQSVGVLIAAYI

SEQ ID NO: 15458 - protein, 20 aa, Bos taurus
ILSASITLCVVLYFILMAQG

SEQ ID NO: 15459 - protein, 20 aa, Bos taurus
FLLPFLFCGHFWQLYNAVTL

SEQ ID NO: 15460 - protein, 20 aa, Bos taurus
AAVCGAFAGGFAAAVTTPLD

SEQ ID NO: 15461 - protein, 20 aa, Bos taurus
LVLCSACFILEVAMVVLHSW

SEQ ID NO: 15462 - protein, 20 aa, Bos taurus
ALFVETLGFLAVLTEAMLGV

SEQ ID NO: 15463 - protein, 20 aa, Bos taurus
FTSGALSGSFAAVVTLPFDV

SEQ ID NO: 15464 - protein, 20 aa, Bos taurus
FLFVALFTGVRIGVGACLLF

SEQ ID NO: 15465 - protein, 20 aa, Bos taurus
LLCGSGAGVISKTLTYPLDL

SEQ ID NO: 15466 - protein, 18 aa, Bos taurus
FSHLRHPVCVELLTVLWV

SEQ ID NO: 15467 - protein, 20 aa, Bos taurus
CAVWLAGGMAGAISWGTATP

SEQ ID NO: 15468 - protein, 20 aa, Bos taurus
WLVALAGGMISSIAVVAVMT

SEQ ID NO: 15469 - protein, 20 aa, Bos taurus
PAVLLLMFLSVYKAFVMETF

SEQ ID NO: 15470 - protein, 20 aa, Bos taurus
LLLLQGTWFWQIGFVLFPPF

SEQ ID NO: 15471 - protein, 20 aa, Bos taurus
IIAGFLAGVSMMFYKSTTIS

SEQ ID NO: 15472 - protein, 22 aa, Bos taurus
FHAFLNTAVHVVMYSYYGLCAL

SEQ ID NO: 15473 - protein, 19 aa, Bos taurus
YYFSAFSAVFFFVPLTLST

SEQ ID NO: 15474 - protein, 20 aa, Bos taurus
LGFTVTLVLLNSLAFLLMAI

SEQ ID NO: 15475 - protein, 20 aa, Bos taurus
NIVMVFMSLYSVLYMSSLLP

SEQ ID NO: 15476 - protein, 20 aa, Bos taurus
IWSFIGPVTFIILLNIIFLV

SEQ ID NO: 15477 - protein, 20 aa, Bos taurus
IWSFIGPATLIIMLNVIFLG

SEQ ID NO: 15478 - protein, 20 aa, Bos taurus
FIWSFIGPVSFVIVVNLVFL

SEQ ID NO: 15479 - protein, 27 aa, Bos taurus
RKHMLQALFITITLGVYFTLLQASEYY

SEQ ID NO: 15480 - protein, 21 aa, Bos taurus
FVIYMFVVHFIIPLIVIFFCY

SEQ ID NO: 15481 - protein, 23 aa, Bos taurus
PGYVLFSALGSFYVPLTIILVMY

SEQ ID NO: 15482 - protein, 24 aa, Bos taurus
FVVYSSIVSFYVPFIVTLLVYIKI

SEQ ID NO: 15483 - protein, 21 aa, Bos taurus
WWLFGFYFCMPLVCTAIFYTL

SEQ ID NO: 15484 - protein, 25 aa, Bos taurus
LPVGLGLTKNILGFLFPFLIILTSY

SEQ ID NO: 15485 - protein, 20 aa, Bos taurus
LVVFQFQHIVVGLLLPGIVI

SEQ ID NO: 15486 - protein, 24 aa, Bos taurus
AKDWWLFSFYFCLPLAITALFYTL

SEQ ID NO: 15487 - protein, 20 aa, Bos taurus
FKVMTAIINFYLPTLLMLWF

SEQ ID NO: 15488 - protein, 18 aa, Bos taurus
EILWTFSIYLESVAILPQ

SEQ ID NO: 15489 - protein, 22 aa, Bos taurus
LMALGFLIGYTCLLAAICFFFA

SEQ ID NO: 15490 - protein, 24 aa, Bos taurus
AVTFGTAIAAFYLPVIIMTVLYWH

SEQ ID NO: 15491 - protein, 19 aa, Bos taurus
LVGLFIAMLALMAVLYVHM

SEQ ID NO: 15492 - protein, 19 aa, Bos taurus
GLRAYVTWIALMVFVAPAL

SEQ ID NO: 15493 - protein, 24 aa, Bos taurus
ENLLKICVFIFAFIMPILIITVCY

SEQ ID NO: 15494 - protein, 20 aa, Bos taurus
AGITCGHFLVPFWTFFGATL

SEQ ID NO: 15495 - protein, 21 aa, Bos taurus
AYIILVLLLNIIAFIIVCACY

SEQ ID NO: 15496 - protein, 20 aa, Bos taurus
SYLVFWAIFNLVTFVVMVVL

SEQ ID NO: 15497 - protein, 23 aa, Bos taurus
QPYAIASSIVSFYLPLVVMVFVY

SEQ ID NO: 15498 - protein, 20 aa, Bos taurus
NRSWLGLRFLRALRLIQFSE

SEQ ID NO: 15499 - protein, 24 aa, Bos taurus
QKWYVISSSIGSFFAPCLIMILVY

SEQ ID NO: 15500 - protein, 19 aa, Bos taurus
VILGLVLPLLVMIVCYSGI

SEQ ID NO: 15501 - protein, 33 aa, Bos taurus
VGDMFNYFLSLAIGVFLFPAFLTASAYVLMIRT

SEQ ID NO: 15502 - protein, 19 aa, Bos taurus
FGATLNSFIHVLMYSYYGL

SEQ ID NO: 15503 - protein, 20 aa, Bos taurus
WINTFLGVSTLSALWTIGII

SEQ ID NO: 15504 - protein, 27 aa, Bos taurus
LYHKHYILFCTTVFTLLLLSIVILYCR

SEQ ID NO: 15505 - protein, 20 aa, Bos taurus
FLLPLLVMAYCYARILAVLL

SEQ ID NO: 15506 - protein, 20 aa, Bos taurus
FVLIGSFVAFFIPLTIMVIT

SEQ ID NO: 15507 - protein, 25 aa, Bos taurus
TYAISSSLISFYIPVAIMIVTYTRI

SEQ ID NO: 15508 - protein, 20 aa, Bos taurus
AIWAFVAPALFIIVVNIGIL

SEQ ID NO: 15509 - protein, 20 aa, Bos taurus
IWPVILNTEINFLGFLLPLL

SEQ ID NO: 15510 - protein, 23 aa, Bos taurus
LLYIIHGPICAALLVNLFFLLNI

SEQ ID NO: 15511 - protein, 20 aa, Bos taurus
WLQFLFCFSYIKLAVTLVKY

SEQ ID NO: 15512 - protein, 20 aa, Bos taurus
FLCGFLVPGLITTACYLTIV

SEQ ID NO: 15513 - protein, 21 aa, Bos taurus
YHLIVIALIYFLPLVVMFVAY

SEQ ID NO: 15514 - protein, 18 aa, Bos taurus
LFPLMLAFILCLYVHMFL

SEQ ID NO: 15515 - protein, 25 aa, Bos taurus
VFFASAFAILGLSALVVTFACNLAT

SEQ ID NO: 15516 - protein, 22 aa, Bos taurus
IQILEICIGFIIPFLIMAVCYF

SEQ ID NO: 15517 - protein, 21 aa, Bos taurus
LYVMSLLVLNVLAFVVICGCY

SEQ ID NO: 15518 - protein, 22 aa, Bos taurus
TITFGTAIAAFYMPVTIMTILY

SEQ ID NO: 15519 - protein, 21 aa, Bos taurus
YALLSSSVSFYLPLLVMLFVY

SEQ ID NO: 15520 - protein, 20 aa, Bos taurus
FLFTMAFFNFLLPLFITVVS

SEQ ID NO: 15521 - protein, 22 aa, Bos taurus
FIYSMCTTVAMFCVPLVLILGC

SEQ ID NO: 15522 - protein, 27 aa, Bos taurus
YTWFLFIFCYIVPLSLICFSYSQLLGA

SEQ ID NO: 15523 - protein, 22 aa, Bos taurus
WITLAVYIVPVIVLATCYGLIS

SEQ ID NO: 15524 - protein, 26 aa, Bos taurus
CAFLLAYASLVALLVAAIVLCNGSVT

SEQ ID NO: 15525 - protein, 17 aa, Bos taurus
NGWIVMIAVGWARGAGG

SEQ ID NO: 15526 - protein, 20 aa, Bos taurus
WWSFGCYFCLPVLFTVTCQL

SEQ ID NO: 15527 - protein, 20 aa, Bos taurus
GVLFVLLMTLFFSGLILAIL

SEQ ID NO: 15528 - protein, 24 aa, Bos taurus
MSYMVYFNFFGCVLPPLLIMLVIY

SEQ ID NO: 15529 - protein, 20 aa, Bos taurus
IIQVPILASIVLNFILFINI

SEQ ID NO: 15530 - protein, 22 aa, Bos taurus
LPWILLGACFIGYVLPLVIILI

SEQ ID NO: 15531 - protein, 20 aa, Bos taurus
TTLLLVLQYFGPLCFIFICY

SEQ ID NO: 15532 - protein, 20 aa, Bos taurus
LYITLVYNASVSLALYALFL

SEQ ID NO: 15533 - protein, 22 aa, Bos taurus
MIMRVLPQTFGFLLPLLVMLFC

SEQ ID NO: 15534 - protein, 23 aa, Bos taurus
VYILTILILNVMAFIIICACYIK

SEQ ID NO: 15535 - protein, 22 aa, Bos taurus
KGPVVGSIMVNFVLFIGIIVIL

SEQ ID NO: 15536 - protein, 24 aa, Bos taurus
DLFMKVCVFVFAFVIPVLIIIVCY

SEQ ID NO: 15537 - protein, 20 aa, Bos taurus
AWGLLLVTYLLPLLVILLSY

SEQ ID NO: 15538 - protein, 19 aa, Bos taurus
YYFISLAFFGFLIPFLVII

SEQ ID NO: 15539 - protein, 20 aa, Bos taurus
LGWGDCVWLPYLYTLQGLYL

SEQ ID NO: 15540 - protein, 26 aa, Bos taurus
SYMYAGFSSFLILATVLCNVLVCGAL

SEQ ID NO: 15541 - protein, 20 aa, Bos taurus
FVGPVTFIVLGNAIIFVITV

SEQ ID NO: 15542 - protein, 22 aa, Bos taurus
FGFMLAFGDLAWVPFTYSLQAQ

SEQ ID NO: 15543 - protein, 25 aa, Bos taurus
VAFGLLFALLGSISVGMSFLLNTIS

SEQ ID NO: 15544 - protein, 27 aa, Bos taurus
YMIVLMITCCFIPLSVIILCYLQVWLA

SEQ ID NO: 15545 - protein, 23 aa, Bos taurus
AVIICLITVFFTMLALMASLYVH

SEQ ID NO: 15546 - protein, 25 aa, Bos taurus
GYAITSSVVSFYVPLCIMAFVYLRV

SEQ ID NO: 15547 - protein, 20 aa, Bos taurus
LTIHIFLVFSFFLVFLIILF

SEQ ID NO: 15548 - protein, 20 aa, Bos taurus
IIAVAAMFLGMDLPGLNLPG

SEQ ID NO: 15549 - protein, 20 aa, Bos taurus
EILHMSFPTKASLYGAILFT

SEQ ID NO: 15550 - protein, 20 aa, Bos taurus
VLSYSVLYASLMLLLVLAIV

SEQ ID NO: 15551 - protein, 20 aa, Bos taurus
AYFTGFIVCLLYAPAALVVC

SEQ ID NO: 15552 - protein, 20 aa, Bos taurus
LWNLLGPSLFALGILATAWT

SEQ ID NO: 15553 - protein, 20 aa, Bos taurus
AFFKLLAVVLFLFTFGLLPW

SEQ ID NO: 15554 - protein, 20 aa, Bos taurus
FLLTFCCLLMAEEAAVFAKY

SEQ ID NO: 15555 - protein, 20 aa, Bos taurus
MAANVAIGLLNAAWWLAWCL

SEQ ID NO: 15556 - protein, 24 aa, Bos taurus
TVFQSSIFSAFVVYLVVLVSVAFM

SEQ ID NO: 15557 - protein, 20 aa, Bos taurus
YMTAAAEFLFLLWGVYLCYA

SEQ ID NO: 15558 - protein, 20 aa, Bos taurus
ILAFGSMLGYAAILAFMCFI

SEQ ID NO: 15559 - protein, 20 aa, Bos taurus
GYMVALVLLNSLCFLVMTVA

SEQ ID NO: 15560 - protein, 20 aa, Bos taurus
SVLGFFGPLLVICLCYLLIV

SEQ ID NO: 15561 - protein, 20 aa, Bos taurus
GINYYRFLVGFLFPICLLLA

SEQ ID NO: 15562 - protein, 24 aa, Bos taurus
MEYMVYFNFFVWVLPPLLLMVLIY

SEQ ID NO: 15563 - protein, 19 aa, Bos taurus
FFTFSCLFIIPLLIMVICN

SEQ ID NO: 15564 - protein, 21 aa, Bos taurus
FIIYAFILGFLVPLTIICLCY

SEQ ID NO: 15565 - protein, 22 aa, Bos taurus
AYLTLLFGTSIVGPGVVIGLLY

SEQ ID NO: 15566 - protein, 24 aa, Bos taurus
VICLIAMFLTMLLLMASLYTHMFL

SEQ ID NO: 15567 - protein, 20 aa, Bos taurus
TIYSLSSLLILYVLPLGIIS

SEQ ID NO: 15568 - protein, 22 aa, Bos taurus
VLLLLLLFFVPGVVMAVAYGLI

SEQ ID NO: 15569 - protein, 20 aa, Bos taurus
SVWGPLGLLLGGGLLCALLT

SEQ ID NO: 15570 - protein, 21 aa, Bos taurus
IYHSCFFIVTYLAPLGLMAMA

SEQ ID NO: 15571 - protein, 20 aa, Bos taurus
FLTLKMNILGFLLPLFAFVY

SEQ ID NO: 15572 - protein, 20 aa, Bos taurus
VYFSFFTWILIPLVVMCAIY

SEQ ID NO: 15573 - protein, 20 aa, Bos taurus
ILFLVDLICCGTILFPVVWS

SEQ ID NO: 15574 - protein, 20 aa, Bos taurus
VLVSDSLFVICALSLAACLC

SEQ ID NO: 15575 - protein, 20 aa, Bos taurus
VAWMNLYRVFVGFLFPWALM

SEQ ID NO: 15576 - protein, 16 aa, Bos taurus
SLGASGAIMTVLAAVC

SEQ ID NO: 15577 - protein, 20 aa, Bos taurus
ILMGIYFVVGLSSVGVFYCL

SEQ ID NO: 15578 - protein, 18 aa, Bos taurus
EILWTFSIYLESVAILPQ

SEQ ID NO: 15579 - protein, 22 aa, Bos taurus
FWYGQLSGMVEPLAGVFGAFAV

SEQ ID NO: 15580 - protein, 20 aa, Bos taurus
FVMALIYVMLLLLCAFSGAW

SEQ ID NO: 15581 - protein, 20 aa, Bos taurus
FWQIWCALLPFLVMLVCYGF

SEQ ID NO: 15582 - protein, 20 aa, Bos taurus
VGVLLVSVVVLILFAILCIF

SEQ ID NO: 15583 - protein, 20 aa, Bos taurus
YIFVGIFWIVFLSLIIFYTA

SEQ ID NO: 15584 - protein, 20 aa, Bos taurus
LIFFFLIPLFIMIGCYLVII

SEQ ID NO: 15585 - protein, 20 aa, Bos taurus
MPPQVVWPLLAYSIVLVAML

SEQ ID NO: 15586 - protein, 20 aa, Bos taurus
AFHLFFEVITGFLLPFLVVV

SEQ ID NO: 15587 - protein, 20 aa, Bos taurus
FISIAIFFNFSAIILISNCL

SEQ ID NO: 15588 - protein, 20 aa, Bos taurus
LLPLLLLAEALGFLLPLAAV

SEQ ID NO: 15589 - protein, 20 aa, Bos taurus
FIIQVTSLLFYILPMTVISV

SEQ ID NO: 15590 - protein, 20 aa, Bos taurus
VCTSQYFLWYLCLLPLVMPL

SEQ ID NO: 15591 - protein, 27 aa, Bos taurus
LITIQVAQMVVGFLIPLMAMSFCYLVI

SEQ ID NO: 15592 - protein, 20 aa, Bos taurus
LYLEIYGLLLPAVGAAALLS

SEQ ID NO: 15593 - protein, 22 aa, Bos taurus
IYTLVLGFVVPMCTLCVLYADL

SEQ ID NO: 15594 - protein, 21 aa, Bos taurus
SRLYTLVLGFAIPVSTICVLY

SEQ ID NO: 15595 - protein, 20 aa, Bos taurus
FLFVFGIEFLGPVFTMTLCY

SEQ ID NO: 15596 - protein, 20 aa, Bos taurus
FLFIFGIEFVGPVVTMTLCY

SEQ ID NO: 15597 - protein, 20 aa, Bos taurus
YIHAAACFAIFVLLPLGLLG

SEQ ID NO: 15598 - protein, 20 aa, Bos taurus
VTIIYNISVSLALYALFLFY

SEQ ID NO: 15599 - protein, 21 aa, Bos taurus
MDFGVFYVVPMILATVLYGFI

SEQ ID NO: 15600 - protein, 25 aa, Bos taurus
RFYLLLFAFLGLLALGISFVCNAIT

SEQ ID NO: 15601 - protein, 20 aa, Bos taurus
WLVVFVPLWILMSFLCLVVL

SEQ ID NO: 15602 - protein, 20 aa, Bos taurus
VAVYSLCFLATVVVVILSVL

SEQ ID NO: 15603 - protein, 20 aa, Bos taurus
YLVIINNMSQLFAMYCLLLF

SEQ ID NO: 15604 - protein, 20 aa, Bos taurus
LGAAFLTSPIFYGRPIAILP

SEQ ID NO: 15605 - protein, 20 aa, Bos taurus
LTGAFTYVVGVYVAIIGFMG

SEQ ID NO: 15606 - protein, 20 aa, Bos taurus
FMLMLAVLMAATHAVYGKLL

SEQ ID NO: 15607 - protein, 22 aa, Bos taurus
WLFLAVEGLSLCSYSLALLHPH

SEQ ID NO: 15608 - protein, 27 aa, Bos taurus
GMAILGPTFTLDALVECLVIGVGTMSG

SEQ ID NO: 15609 - protein, 20 aa, Bos taurus
IKDILGALLLILALMLLVLF

SEQ ID NO: 15610 - protein, 20 aa, Bos taurus
MWLILPAWPLAMMWFISTLA

SEQ ID NO: 15611 - protein, 27 aa, Bos taurus
FFDSLNEAIMRLVAVIMWYAPLGILFL

SEQ ID NO: 15612 - protein, 20 aa, Bos taurus
PFSWVTGYLAILVGAGMTFI

SEQ ID NO: 15613 - protein, 20 aa, Bos taurus
IPEIIFMTSLFGYLVILIFY

SEQ ID NO: 15614 - protein, 20 aa, Bos taurus
GGIFLGAILLSSPLMCLHAA

SEQ ID NO: 15615 - protein, 27 aa, Bos taurus
FFNALSDATMKIVQIIMCYMPIGILFL

SEQ ID NO: 15616 - protein, 20 aa, Bos taurus
PLVLQQAYLIMISALMALVF

SEQ ID NO: 15617 - protein, 20 aa, Bos taurus
IVLIGYFTLVPAIQEFCLFA

SEQ ID NO: 15618 - protein, 20 aa, Bos taurus
IPELLFMLCIFGYLIFMIIY

SEQ ID NO: 15619 - protein, 22 aa, Bos taurus
ILPVLGVVGGAIFSCSNYFHVI

SEQ ID NO: 15620 - protein, 27 aa, Bos taurus
FFNSFNDATMVLVSWIMWYAPVGILFL

SEQ ID NO: 15621 - protein, 20 aa, Bos taurus
IISEGLYAIAVVLSFSRIAY

SEQ ID NO: 15622 - protein, 20 aa, Bos taurus
YGLLYYNALFMILPTLAIAY

SEQ ID NO: 15623 - protein, 20 aa, Bos taurus
FISFNLILCVVISVLSIHPK

SEQ ID NO: 15624 - protein, 20 aa, Bos taurus
VAASFLVSKKIGLLTTMAIL

SEQ ID NO: 15625 - protein, 20 aa, Bos taurus
MFLFQFVNLNSSTFYIAFFL

SEQ ID NO: 15626 - protein, 18 aa, Bos taurus
SFYALLTCSVIIGGFWLG

SEQ ID NO: 15627 - protein, 20 aa, Bos taurus
EILTLFCGAPPVTPIIILSI

SEQ ID NO: 15628 - protein, 20 aa, Bos taurus
LLAIMILVGDSLHNFADGLV

SEQ ID NO: 15629 - protein, 20 aa, Bos taurus
VCLPLYFSGIMWTLIYDTIY

SEQ ID NO: 15630 - protein, 20 aa, Bos taurus
AMELCLALLLHKGILAVSLS

SEQ ID NO: 15631 - protein, 20 aa, Bos taurus
VVSLFVGVAIHETLVAVALG

SEQ ID NO: 15632 - protein, 20 aa, Bos taurus
LGFFGSIFGLMGVYVYDGEL

SEQ ID NO: 15633 - protein, 20 aa, Bos taurus
TIGYGELLLLLSLTLDGLTG

SEQ ID NO: 15634 - protein, 20 aa, Bos taurus
VDAIAIAIIGFAITVSLSEM

SEQ ID NO: 15635 - protein, 20 aa, Bos taurus
IPRQLVYIGLYLFHIAGAYL

SEQ ID NO: 15636 - protein, 20 aa, Bos taurus
LWTFAILIFFWVLWVAVLLS

SEQ ID NO: 15637 - protein, 20 aa, Bos taurus
PLHITPLGLLLLILYCLISG

SEQ ID NO: 15638 - protein, 20 aa, Bos taurus
GLVFLTALSGAFVAGLDAGL

SEQ ID NO: 15639 - protein, 20 aa, Bos taurus
VLLLGGLFLAYRMGVFILAG

SEQ ID NO: 15640 - protein, 20 aa, Bos taurus
EVLFNSLFSAYYVAFLPLCF

SEQ ID NO: 15641 - protein, 20 aa, Bos taurus
EVLVSAMLSAYYVAFVPVWF

SEQ ID NO: 15642 - protein, 20 aa, Bos taurus
SLQSTGQVFLGVYLVCVAYS

SEQ ID NO: 15643 - protein, 20 aa, Bos taurus
ATMVLVSWIMWYVPVGIMFL

SEQ ID NO: 15644 - protein, 20 aa, Bos taurus
IPYQNIGITLVCLIIPVAFG

SEQ ID NO: 15645 - protein, 20 aa, Bos taurus
LLASLPLLLGLGFLSLWYPV

SEQ ID NO: 15646 - protein, 20 aa, Bos taurus
IYLAAHFPHQVVAGVLSGIA

SEQ ID NO: 15647 - protein, 34 aa, Bos taurus
RKRFLLRRLLEMLFLTQLQVGLIQQWMVPAIQNS

SEQ ID NO: 15648 - protein, 20 aa, Bos taurus
LQQAYLIMISALMALVFIKY

SEQ ID NO: 15649 - protein, 20 aa, Bos taurus
GLAALSFSISSLTLVGMLAA

SEQ ID NO: 15650 - protein, 20 aa, Bos taurus
ILLLLTVWLLVGFPLTVIGG

SEQ ID NO: 15651 - protein, 20 aa, Bos taurus
VALLCMWFGISLPLVYLGYY

SEQ ID NO: 15652 - protein, 18 aa, Bos taurus
FPHQVLAGLITGAVLGWL

SEQ ID NO: 15653 - protein, 20 aa, Bos taurus
DLILHQFLPVGFVTLSLSLI

SEQ ID NO: 15654 - protein, 20 aa, Bos taurus
QVILDILLCNGGGIWLGMVV

SEQ ID NO: 15655 - protein, 20 aa, Bos taurus
VGVIGVTLMALLSGFGAVNC

SEQ ID NO: 15656 - protein, 20 aa, Bos taurus
IGLYWVGSIIMSIVVFVPGN

SEQ ID NO: 15657 - protein, 20 aa, Bos taurus
GFVVFATLVVIVSLILIFVV

SEQ ID NO: 15658 - protein, 19 aa, Bos taurus
KKSIAYTLTSNIPEITPFL

SEQ ID NO: 15659 - protein, 20 aa, Bos taurus
VLYIIELWFAFVNGFSGQIL

SEQ ID NO: 15660 - protein, 20 aa, Bos taurus
LQFQLTVNVVAVIVAFTGAC

SEQ ID NO: 15661 - protein, 20 aa, Bos taurus
VWEGLLTFFFFPICVVFAWV

SEQ ID NO: 15662 - protein, 19 aa, Bos taurus
KNFVRFQLSTSIAALTLIS

SEQ ID NO: 15663 - protein, 19 aa, Bos taurus
KKSIAYTLTSNIPEITPFL

SEQ ID NO: 15664 - protein, 19 aa, Bos taurus
KQFIRYLISSNVGEVVCIF

SEQ ID NO: 15665 - protein, 20 aa, Bos taurus
CILYCFYKNIVLYIIEIWFA

SEQ ID NO: 15666 - protein, 20 aa, Bos taurus
IWGVPSLLEISGFSYFYGAF

SEQ ID NO: 15667 - protein, 20 aa, Bos taurus
LIISTMQAVFSSVFYFASVP

SEQ ID NO: 15668 - protein, 20 aa, Bos taurus
LVTFALLLVCIAYWAIIALF

SEQ ID NO: 15669 - protein, 12 aa, Bos taurus
GHGIAAIREQVR

SEQ ID NO: 15670 - protein, 19 aa, Bos taurus
FLTWRIFFASMISTFTLNF

SEQ ID NO: 15671 - protein, 19 aa, Bos taurus
ILYYVYMGLLAVFCTNAIN

SEQ ID NO: 15672 - protein, 20 aa, Bos taurus
LVTFFLLCLCIAYWASTAIF

SEQ ID NO: 15673 - protein, 20 aa, Bos taurus
GIQWASLLILFLSIVALTSG

SEQ ID NO: 15674 - protein, 22 aa, Bos taurus
ILFLPWGYDISQVTISFVYIVT

SEQ ID NO: 15675 - protein, 20 aa, Bos taurus
YGLGSGISLFIATNICETIV

SEQ ID NO: 15676 - protein, 20 aa, Bos taurus
LPLWAIFMGFFSHFWLCTII

SEQ ID NO: 15677 - protein, 20 aa, Bos taurus
LLSATALNYLLSLVAVVLFF

SEQ ID NO: 15678 - protein, 20 aa, Bos taurus
YGLGSGISLFIATNICETIV

SEQ ID NO: 15679 - protein, 17 aa, Bos taurus
IRLTLIPITLGVILNSY

SEQ ID NO: 15680 - protein, 20 aa, Bos taurus
FTLSKLLAVILSIGGVVLVN

SEQ ID NO: 15681 - protein, 20 aa, Bos taurus
PVLNYIGAGLSVVSAFIFLF

SEQ ID NO: 15682 - protein, 20 aa, Bos taurus
TFQVTYQLKILTTALFSVLM

SEQ ID NO: 15683 - protein, 20 aa, Bos taurus
IPLSSGLILLTWQKLAPMSV

SEQ ID NO: 15684 - protein, 20 aa, Bos taurus
SVLLLLAYAFYVFTMKWNQQ

SEQ ID NO: 15685 - protein, 20 aa, Bos taurus
LGYTSGLSLLCMMFFLIVVI

SEQ ID NO: 15686 - protein, 20 aa, Bos taurus
PEAAISAYLAATALHVMLSQ

SEQ ID NO: 15687 - protein, 20 aa, Bos taurus
YLGYTSGLSLTCMLFFLISV

SEQ ID NO: 15688 - protein, 20 aa, Bos taurus
ISGGAMGGTLSAVASLVDLA

SEQ ID NO: 15689 - protein, 20 aa, Bos taurus
GLPFWLVRWLLFRLMFASGV

SEQ ID NO: 15690 - protein, 20 aa, Bos taurus
FLSVVGTWYVTAIIIIKYIW

SEQ ID NO: 15691 - protein, 20 aa, Bos taurus
LISLGLIVFLVSALSLGPFL

SEQ ID NO: 15692 - protein, 22 aa, Bos taurus
IITMYNGAFDSSSAVFLIIKLL

SEQ ID NO: 15693 - protein, 20 aa, Bos taurus
MITAPCILFLFYGWPGLFLE

SEQ ID NO: 15694 - protein, 20 aa, Bos taurus
RVGDAVLGLVCMVLLLVLKL

SEQ ID NO: 15695 - protein, 20 aa, Bos taurus
LTTFFVGEGLSGLLPALVAL

SEQ ID NO: 15696 - protein, 20 aa, Bos taurus
IFFLIFQSSGVWGNLISSLV

SEQ ID NO: 15697 - protein, 20 aa, Bos taurus
FVWSFLIVTVALFVNLIYIL

SEQ ID NO: 15698 - protein, 20 aa, Bos taurus
AVIGVAFSLGFTLGPTLGAF

SEQ ID NO: 15699 - protein, 20 aa, Bos taurus
FYCSLFSAAGSLSVFASYAF

SEQ ID NO: 15700 - protein, 20 aa, Bos taurus
IWFYFGVVGSFIFLLIQLLL

SEQ ID NO: 15701 - protein, 20 aa, Bos taurus
LGKISLISTVLTTLILGIVV

SEQ ID NO: 15702 - protein, 20 aa, Bos taurus
TAFCGSYAGAVVAMPLAGVL

SEQ ID NO: 15703 - protein, 20 aa, Bos taurus
TSFCGSYAGAVIAMPLAGIL

SEQ ID NO: 15704 - protein, 20 aa, Bos taurus
FFNWFYWSINLGAIVSLGGI

SEQ ID NO: 15705 - protein, 29 aa, Bos taurus
LFVWSVMITAVLLLLSLPVLAAGITMLLT

SEQ ID NO: 15706 - protein, 20 aa, Bos taurus
LLAIGFGLVVAASHLLVTAT

SEQ ID NO: 15707 - protein, 20 aa, Bos taurus
LGTLHQLGIVVGILIAQVFG

SEQ ID NO: 15708 - protein, 17 aa, Bos taurus
VVWITATMPYVVLFALL

SEQ ID NO: 15709 - protein, 20 aa, Bos taurus
AAYVRYLNSSAFFFSGFFVV

SEQ ID NO: 15710 - protein, 20 aa, Bos taurus
LAIVTGILISQIVGLDFILG

SEQ ID NO: 15711 - protein, 20 aa, Bos taurus
LGVVPQLFITIGILVAQIFG

SEQ ID NO: 15712 - protein, 20 aa, Bos taurus
SCVQLMVVTGILLAYLAGWV

SEQ ID NO: 15713 - protein, 25 aa, Bos taurus
TIRMALLEACIGVAGMLASFIGGFL

SEQ ID NO: 15714 - protein, 20 aa, Bos taurus
LGTLNQLAIVTGILIAQVLG

SEQ ID NO: 15715 - protein, 19 aa, Bos taurus
FAVVGTLWNAFFLGGLMYA

SEQ ID NO: 15716 - protein, 20 aa, Bos taurus
AVTAGLVSSISHLLVLAMHQ

SEQ ID NO: 15717 - protein, 20 aa, Bos taurus
AFASLICIIFIYEALEKLFE

SEQ ID NO: 15718 - protein, 23 aa, Bos taurus
EGFSSLISFIFIYDAFKKMIKLA

SEQ ID NO: 15719 - protein, 17 aa, Bos taurus
VVYFTATFPFAMLLVLL

SEQ ID NO: 15720 - protein, 19 aa, Bos taurus
GKVVWVTATFPYIILLILL

SEQ ID NO: 15721 - protein, 20 aa, Bos taurus
VVYFTATFPYLMLVVLLIRG

SEQ ID NO: 15722 - protein, 20 aa, Bos taurus
ILYQMAFTVGLVLLSGLAYI

SEQ ID NO: 15723 - protein, 24 aa, Bos taurus
TSGKVVWITATLPYLVLFVLLVHG

SEQ ID NO: 15724 - protein, 20 aa, Bos taurus
FGTLNQLGIVIGILVAQIFG

SEQ ID NO: 15725 - protein, 22 aa, Bos taurus
AMGIALGGLAMGVLVGPPFGSV

SEQ ID NO: 15726 - protein, 17 aa, Bos taurus
VVYFTATFPYVVLTILF

SEQ ID NO: 15727 - protein, 20 aa, Bos taurus
WLCMFWMIGGVYAAAMAWAI

SEQ ID NO: 15728 - protein, 20 aa, Bos taurus
GLLVSLNELMIVIGILFAYI

SEQ ID NO: 15729 - protein, 20 aa, Bos taurus
LTGYVYSLGQFLLAGMAYAV

SEQ ID NO: 15730 - protein, 20 aa, Bos taurus
VFGPACGFILGSFCTKIYVD

SEQ ID NO: 15731 - protein, 20 aa, Bos taurus
LLLMALLEVVLFGLNEFVLL

SEQ ID NO: 15732 - protein, 17 aa, Bos taurus
IMYFSSLFPYVVLICFL

SEQ ID NO: 15733 - protein, 20 aa, Bos taurus
IVASWFISPLLSGFMSGVLF

SEQ ID NO: 15734 - protein, 20 aa, Bos taurus
VVLVVLLVRGVLLPGALDGI

SEQ ID NO: 15735 - protein, 25 aa, Bos taurus
LYVSVILLIGMTALLTVTGGLVAVI

SEQ ID NO: 15736 - protein, 20 aa, Bos taurus
IALMIGSYASSAVTFPGVKV

SEQ ID NO: 15737 - protein, 20 aa, Bos taurus
IHLHSFFAFGTMVVALTGYF

SEQ ID NO: 15738 - protein, 20 aa, Bos taurus
LAMGLALTGVGLSSFAFAPL

SEQ ID NO: 15739 - protein, 20 aa, Bos taurus
ILLIEVFWAIGTVFEVVLAV

SEQ ID NO: 15740 - protein, 21 aa, Bos taurus
LNLVFGLQLSMARIGSTVNMN

SEQ ID NO: 15741 - protein, 20 aa, Bos taurus
LYSLWPLVFLGVGRLVAIKS

SEQ ID NO: 15742 - protein, 20 aa, Bos taurus
AFFGFLITIMALTFGYEYVV

SEQ ID NO: 15743 - protein, 20 aa, Bos taurus
MTLSICAACLGQIILGGLAF

SEQ ID NO: 15744 - protein, 22 aa, Bos taurus
LLIMTLFQVTLFSINEYILLNL

SEQ ID NO: 15745 - protein, 20 aa, Bos taurus
VLGIIVRGPALCLAAAGFSL

SEQ ID NO: 15746 - protein, 20 aa, Bos taurus
PLANGLAMAGSPVFLSTLAP

SEQ ID NO: 15747 - protein, 20 aa, Bos taurus
LIMGIWNSHTSVGNILGSLL

SEQ ID NO: 15748 - protein, 20 aa, Bos taurus
MTILEITVYAANEYLVFKIL

SEQ ID NO: 15749 - protein, 20 aa, Bos taurus
MLVEKSLSVILLVVALAMLI

SEQ ID NO: 15750 - protein, 20 aa, Bos taurus
GWVSATFAASLVSSPAIGAY

SEQ ID NO: 15751 - protein, 20 aa, Bos taurus
VLSSTFWTGGVMLLALIGYL

SEQ ID NO: 15752 - protein, 20 aa, Bos taurus
MLSVFYFAIPVGSGLGYIAG

SEQ ID NO: 15753 - protein, 20 aa, Bos taurus
FWNHVLAVAAGVAAEAVACW

SEQ ID NO: 15754 - protein, 20 aa, Bos taurus
VVFGLWSACASVGNILGACL

SEQ ID NO: 15755 - protein, 20 aa, Bos taurus
LAAACSGVIYFTLYLPHILC

SEQ ID NO: 15756 - protein, 20 aa, Bos taurus
LYFLFYTLAGSLPLLVALIY

SEQ ID NO: 15757 - protein, 14 aa, Bos taurus
IYWAAKCALAYFYM

SEQ ID NO: 15758 - protein, 20 aa, Bos taurus
LWGSVFATGIVCTFYCTLGG

SEQ ID NO: 15759 - protein, 20 aa, Bos taurus
YLYLLPAGTFVGGYLASLYS

SEQ ID NO: 15760 - protein, 20 aa, Bos taurus
IVGLLAVTALYTIAGGLAAV

SEQ ID NO: 15761 - protein, 20 aa, Bos taurus
VIMLAITALYTIAGGLTAVI

SEQ ID NO: 15762 - protein, 20 aa, Bos taurus
LFIGWEGVGIMSFLLIGWWY

SEQ ID NO: 15763 - protein, 20 aa, Bos taurus
VLNVLNLAVWVFIMIAGFFF

SEQ ID NO: 15764 - protein, 20 aa, Bos taurus
VIEVLEALLIFVYLNMILLY

SEQ ID NO: 15765 - protein, 20 aa, Bos taurus
AMSIPVWIILLFHLASLAGA

SEQ ID NO: 15766 - protein, 20 aa, Bos taurus
VTFYIYFSLVLIQLVLSCFS

SEQ ID NO: 15767 - protein, 9 aa, Bos taurus
TLGTEITVE

SEQ ID NO: 15768 - protein, 9 aa, Bos taurus
TLGTEIAIE

SEQ ID NO: 15769 - protein, 9 aa, Bos taurus
TLGTEISWE

SEQ ID NO: 15770 - protein, 20 aa, Bos taurus
LTSLQLIQFVLITIHISQFF

SEQ ID NO: 15771 - protein, 22 aa, Bos taurus
LLLSAAVFCIFILCFGPTNILL

SEQ ID NO: 15772 - protein, 20 aa, Bos taurus
CIFFCPVAFFSFAPLITAVS

SEQ ID NO: 15773 - protein, 20 aa, Bos taurus
IGLIPVSVWFTILLGGVIFT

SEQ ID NO: 15774 - protein, 20 aa, Bos taurus
LGAFALLCLLGLTWSFGLLF

SEQ ID NO: 15775 - protein, 20 aa, Bos taurus
WVIGAIALLCLLGLTWAFGL

SEQ ID NO: 15776 - protein, 20 aa, Bos taurus
LGAIALLFLLGLTWAFGLLF

SEQ ID NO: 15777 - protein, 32 aa, Bos taurus
GVYGSTFFVATGFHGLHVIIGSTFLIVCFFRQ

SEQ ID NO: 15778 - protein, 21 aa, Bos taurus
MVIIMVIAFLICWLPYAGVAF

SEQ ID NO: 15779 - protein, 23 aa, Bos taurus
LGIVVGCFVLCWLPFFLVMPIGS

SEQ ID NO: 15780 - protein, 21 aa, Bos taurus
MLAIVLGVFIICWLPFFITHI

SEQ ID NO: 15781 - protein, 21 aa, Bos taurus
TVFCLVVIFALCWFPLHLSRI

SEQ ID NO: 15782 - protein, 28 aa, Bos taurus
KIILAIVLFFFFSWVPHQIFTFMDVLIQ

SEQ ID NO: 15783 - protein, 19 aa, Bos taurus
VILILTFFACWLPYYIGIS

SEQ ID NO: 15784 - protein, 25 aa, Bos taurus
VFCLVLVFALCWLPLHLSRILKLTL

SEQ ID NO: 15785 - protein, 21 aa, Bos taurus
LGFIMAAFIICWIPYFIFFMV

SEQ ID NO: 15786 - protein, 18 aa, Bos taurus
HYLFALGVYRTLYLFNWI

SEQ ID NO: 15787 - protein, 22 aa, Bos taurus
FITFSMLIFFIVWISFIPAYAS

SEQ ID NO: 15788 - protein, 22 aa, Bos taurus
TILAILLAFIITWAPYNVMVLI

SEQ ID NO: 15789 - protein, 25 aa, Bos taurus
ATLTILLGVFFLCWGPFFLHLSLIV

SEQ ID NO: 15790 - protein, 21 aa, Bos taurus
MTLVIVIVYVLCWAPFFLVQL

SEQ ID NO: 15791 - protein, 26 aa, Bos taurus
ITRMVLVVVAVFIVCWTPIHIYVIIK

SEQ ID NO: 15792 - protein, 20 aa, Bos taurus
FVIVAFSKHIVEQMVAFIGA

SEQ ID NO: 15793 - protein, 23 aa, Bos taurus
MAVLIFTDFMCMAPISFYALSAL

SEQ ID NO: 15794 - protein, 24 aa, Bos taurus
LLKTVVIVLGAFIICWTPGLVLLL

SEQ ID NO: 15795 - protein, 23 aa, Bos taurus
LGIIMGTFTLCWLPFFIVNIVHV

SEQ ID NO: 15796 - protein, 20 aa, Bos taurus
VNLLSIFISTWLTAAGFIHL

SEQ ID NO: 15797 - protein, 24 aa, Bos taurus
VLAVVIGVFVVCWFPFFFTYTLTA

SEQ ID NO: 15798 - protein, 24 aa, Bos taurus
LIFVIMIVYFLFWAPYNIVLLLST

SEQ ID NO: 15799 - protein, 39 aa, Bos taurus
SGKKRRRAIKLIVTVLAMYLICFTPSNLLLVVHYFLIKT

SEQ ID NO: 15800 - protein, 20 aa, Bos taurus
GQLLQFVLTIIQTSCGVIWP

SEQ ID NO: 15801 - protein, 20 aa, Bos taurus
FVLFQALLILSALQPSIFSV

SEQ ID NO: 15802 - protein, 20 aa, Bos taurus
VIIVLGVFIACWAPLFILLL

SEQ ID NO: 15803 - protein, 20 aa, Bos taurus
VVVVVVAFALCWTPYHLVVL

SEQ ID NO: 15804 - protein, 21 aa, Bos taurus
LGIVFFLFVVMWCPFFITNIM

SEQ ID NO: 15805 - protein, 26 aa, Bos taurus
TLSVIMGVFVCCWLPFFILNCMVPFC

SEQ ID NO: 15806 - protein, 20 aa, Bos taurus
AVAVLLPILGTSWVFGVLAV

SEQ ID NO: 15807 - protein, 20 aa, Bos taurus
LIFLVVVVFFLFWTPYNVMI

SEQ ID NO: 15808 - protein, 17 aa, Bos taurus
ATLILVPLLGIEFVLIP

SEQ ID NO: 15809 - protein, 20 aa, Bos taurus
SIGNVLLDFTGGSFSLLQMF

SEQ ID NO: 15810 - protein, 20 aa, Bos taurus
IILTIIVTFFLCWCPYHAFY

SEQ ID NO: 15811 - protein, 20 aa, Bos taurus
MVLVVVTFAICWLPYHLYFI

SEQ ID NO: 15812 - protein, 26 aa, Bos taurus
AVTLTVLLGVFIFCWAPFVLHVLLMT

SEQ ID NO: 15813 - protein, 23 aa, Bos taurus
LMGIMCVLSVCWSPLLIMMLKMI

SEQ ID NO: 15814 - protein, 23 aa, Bos taurus
LFTVVIVFIVTQLPYNIVKFCQA

SEQ ID NO: 15815 - protein, 23 aa, Bos taurus
MAMLIFTDFLCMAPISFFAISAS

SEQ ID NO: 15816 - protein, 20 aa, Bos taurus
LSAILLAFIITWTPYNIMVL

SEQ ID NO: 15817 - protein, 21 aa, Bos taurus
TLGLIMGTFTLCWLPFFVVNV

SEQ ID NO: 15818 - protein, 20 aa, Bos taurus
LLLGWGPYALLYLYATIADA

SEQ ID NO: 15819 - protein, 23 aa, Bos taurus
LVIIVLTVFAVSYIPFHVMKTMN

SEQ ID NO: 15820 - protein, 23 aa, Bos taurus
MVVVMVGSFCLCYTPYAALAMYI

SEQ ID NO: 15821 - protein, 18 aa, Bos taurus
MTFIVVLAFIVCWTPFFF

SEQ ID NO: 15822 - protein, 24 aa, Bos taurus
DHLILLALMTGIMAVCSLPLTPQI

SEQ ID NO: 15823 - protein, 16 aa, Bos taurus
SYPAKVTLLGSVIFTF

SEQ ID NO: 15824 - protein, 20 aa, Bos taurus
AGLAAVHALCALPENVCNVV

SEQ ID NO: 15825 - protein, 20 aa, Bos taurus
PWLHAVYAVLGAGVFTLFLA

SEQ ID NO: 15826 - protein, 23 aa, Bos taurus
LALIVGIFALCWLPVHTINCASL

SEQ ID NO: 15827 - protein, 20 aa, Bos taurus
LLKSTLVLMPLFGVHYIVFM

SEQ ID NO: 15828 - protein, 23 aa, Bos taurus
ALNTIIFIIVVFVVCFTPYHVAI

SEQ ID NO: 15829 - protein, 20 aa, Bos taurus
INIMLLSIVVAFAVCWLPLT

SEQ ID NO: 15830 - protein, 20 aa, Bos taurus
FLTIKAVIFLSFWQGLLLAI

SEQ ID NO: 15831 - protein, 21 aa, Bos taurus
VIFAVVLVFLLCWLPYNLVLI

SEQ ID NO: 15832 - protein, 23 aa, Bos taurus
MAVLIFTDFTCMAPISFFAISAA

SEQ ID NO: 15833 - protein, 20 aa, Bos taurus
LARSTLLLIPLFGIHYTVFA

SEQ ID NO: 15834 - protein, 21 aa, Bos taurus
LVLVVVAVFVVCWTPIHIFIL

SEQ ID NO: 15835 - protein, 20 aa, Bos taurus
FCLLVVVVVVFAVCWLPLHV

SEQ ID NO: 15836 - protein, 24 aa, Bos taurus
WYIKASLLTFVIFTICFAPSNIIL

SEQ ID NO: 15837 - protein, 20 aa, Bos taurus
QLPTYYALGVLLLGLLGYYI

SEQ ID NO: 15838 - protein, 27 aa, Bos taurus
IQMVILLIATSLVVLICSIPLVVRVFV

SEQ ID NO: 15839 - protein, 20 aa, Bos taurus
ITAIAQLFVLGCTWVFGLLL

SEQ ID NO: 15840 - protein, 17 aa, Bos taurus
WPLASFICLINAVGYYI

SEQ ID NO: 15841 - protein, 23 aa, Bos taurus
LMGIMVVASICWMPLLVFIAQTV

SEQ ID NO: 15842 - protein, 23 aa, Bos taurus
MVMVMIFAYCLCWGPYTFFACFA

SEQ ID NO: 15843 - protein, 22 aa, Bos taurus
ILIGVFVVCWAPFFLHLIFYIS

SEQ ID NO: 15844 - protein, 29 aa, Bos taurus
QKALKTLGIIMGVFTLCWLPFFLANVVKA

SEQ ID NO: 15845 - protein, 20 aa, Bos taurus
VCTVLAVFIICFVPHHLVQL

SEQ ID NO: 15846 - protein, 20 aa, Bos taurus
YAMIGFVAWHVGTEIILEIH

SEQ ID NO: 15847 - protein, 20 aa, Bos taurus
ASLIFIFTMFMVSCKVFLTA

SEQ ID NO: 15848 - protein, 20 aa, Bos taurus
HLLLLALMTVLFTMCSLPLI

SEQ ID NO: 15849 - protein, 20 aa, Bos taurus
VLFRITSVFYMLWLPYIIYF

SEQ ID NO: 15850 - protein, 20 aa, Bos taurus
LFCLCPGSLIAGSAILLYAF

SEQ ID NO: 15851 - protein, 20 aa, Bos taurus
ISGFISGLFLSFAFLPYISF

SEQ ID NO: 15852 - protein, 20 aa, Bos taurus
VFLLNVLLLGLWNFLLLCTV

SEQ ID NO: 15853 - protein, 20 aa, Bos taurus
VVLLLQGLSLLELLDFPPLF

SEQ ID NO: 15854 - protein, 21 aa, Bos taurus
FLELIVVTLAVCWMPNQVRRI

SEQ ID NO: 15855 - protein, 20 aa, Bos taurus
AVAVHNELIISAIFHTIRFV

SEQ ID NO: 15856 - protein, 20 aa, Bos taurus
FITFGMLIYFIAWITFIPIY

SEQ ID NO: 15857 - protein, 20 aa, Bos taurus
VALLLFTNCILHCPVAFLSF

SEQ ID NO: 15858 - protein, 20 aa, Bos taurus
VVVVVLVFAGCWLPFFIVNI

SEQ ID NO: 15859 - protein, 20 aa, Bos taurus
VLSTVVIFLACFLPYHVLLL

SEQ ID NO: 15860 - protein, 23 aa, Bos taurus
LALILFLFALSWLPLHILNCITL

SEQ ID NO: 15861 - protein, 18 aa, Bos taurus
PYYVLGIWYWFDPDMVNR

SEQ ID NO: 15862 - protein, 24 aa, Bos taurus
VTRMVSIVVAVFIFCWLPFYIFNV

SEQ ID NO: 15863 - protein, 25 aa, Bos taurus
LILGIVLLFWACFLPFWLWQLLAQY

SEQ ID NO: 15864 - protein, 25 aa, Bos taurus
LAMLLGVFIVCWAPFFLHLILMISC

SEQ ID NO: 15865 - protein, 20 aa, Bos taurus
MLVCVVVVFAVSWLPLHAFQ

SEQ ID NO: 15866 - protein, 21 aa, Bos taurus
MLLVIVVLFFLCWLPVYSANT

SEQ ID NO: 15867 - protein, 20 aa, Bos taurus
AVTGAALIATAADYFAELLL

SEQ ID NO: 15868 - protein, 22 aa, Bos taurus
MLMVVLLVFALCYLPISVLNVL

SEQ ID NO: 15869 - protein, 20 aa, Bos taurus
LVFTIMAVFLLMWGPYNIVL

SEQ ID NO: 15870 - protein, 23 aa, Bos taurus
LSLVLFLFALSWLPLSIINCIIY

SEQ ID NO: 15871 - protein, 20 aa, Bos taurus
VMVICYIYFTRIIAILLRAV

SEQ ID NO: 15872 - protein, 20 aa, Bos taurus
GAMVLLYASRACYNLAALAL

SEQ ID NO: 15873 - protein, 20 aa, Bos taurus
LALSLIAIVLVCFAPYHVLL

SEQ ID NO: 15874 - protein, 22 aa, Bos taurus
LAIIFLPMFTFTAGNALKAIIA

SEQ ID NO: 15875 - protein, 20 aa, Bos taurus
CFAVFLCFTLSYIPFLLLNI

SEQ ID NO: 15876 - protein, 18 aa, Bos taurus
HYLFFLGLYRALYLVNWI

SEQ ID NO: 15877 - protein, 17 aa, Bos taurus
ILPYALAFAAGAMVYVI

SEQ ID NO: 15878 - protein, 20 aa, Bos taurus
GVFILLTTTASIAVWVVWIV

SEQ ID NO: 15879 - protein, 20 aa, Bos taurus
VTILVVIGAFMVTWGPYMVV

SEQ ID NO: 15880 - protein, 20 aa, Bos taurus
VLEIVYASLGALLFTCFLAV

SEQ ID NO: 15881 - protein, 20 aa, Bos taurus
IFSIMFVFFICFVPYHIARI

SEQ ID NO: 15882 - protein, 20 aa, Bos taurus
IIITLMVQVLVCFMPFHICF

SEQ ID NO: 15883 - protein, 20 aa, Bos taurus
GALLFVLSDSVLAWNIFTYL

SEQ ID NO: 15884 - protein, 20 aa, Bos taurus
LVALIILAFAAFWLPYHVVN

SEQ ID NO: 15885 - protein, 20 aa, Bos taurus
ILLVTTGYIICFVPYHIVRI

SEQ ID NO: 15886 - protein, 20 aa, Bos taurus
LVIFLLCFVPYNATLAVYGL

SEQ ID NO: 15887 - protein, 20 aa, Bos taurus
VTKMLFVLVLVFAICWAPFH

SEQ ID NO: 15888 - protein, 20 aa, Bos taurus
VVLLMLWFIGQALWLAPAYV

SEQ ID NO: 15889 - protein, 25 aa, Bos taurus
VIIAVVVVFVAFQLPYNGVVLAHTV

SEQ ID NO: 15890 - protein, 20 aa, Bos taurus
LLFGLCWGPYVATLLLSVLA

SEQ ID NO: 15891 - protein, 22 aa, Bos taurus
KVSLLVLAVLAVGLLCWTPFHL

SEQ ID NO: 15892 - protein, 24 aa, Bos taurus
VTVLVVAILAVCLLVWTPYHLSTV

SEQ ID NO: 15893 - protein, 20 aa, Bos taurus
VLVLMCILTAYVLCWAPFYG

SEQ ID NO: 15894 - protein, 20 aa, Bos taurus
VLVLMCILTAYVLCWAPFYG

SEQ ID NO: 15895 - protein, 20 aa, Bos taurus
VLWVWFIFWWPQGMTLGLDS

SEQ ID NO: 15896 - protein, 20 aa, Bos taurus
FFMVKSVIFLSFWQGMLLAI

SEQ ID NO: 15897 - protein, 21 aa, Bos taurus
MLAVVVILFALLWMPYRTLVV

SEQ ID NO: 15898 - protein, 16 aa, Bos taurus
LLGIMCVSCICWSPFL

SEQ ID NO: 15899 - protein, 20 aa, Bos taurus
VTMAICWITIVVPLLIFEVL

SEQ ID NO: 15900 - protein, 20 aa, Bos taurus
VVYTFLAVLLYLSAAVIWPV

SEQ ID NO: 15901 - protein, 20 aa, Bos taurus
VVFVSFWQAVVIALLVKVGV

SEQ ID NO: 15902 - protein, 20 aa, Bos taurus
GLAYLAFTGPLVHSVLCHTA

SEQ ID NO: 15903 - protein, 20 aa, Bos taurus
TELAAGTGALLFIVSDLTIA

SEQ ID NO: 15904 - protein, 20 aa, Bos taurus
FYAITLLFLLLWSPYIVACY

SEQ ID NO: 15905 - protein, 20 aa, Bos taurus
NISSGTYLALGVLSCLGFVV

SEQ ID NO: 15906 - protein, 28 aa, Bos taurus
IMCCFGCMSVLANYFVFMTFFPACVSLV

SEQ ID NO: 15907 - protein, 20 aa, Bos taurus
LGGVLALAFSILILALIPLL

SEQ ID NO: 15908 - protein, 20 aa, Bos taurus
LFFMAEYANIIMMNIFTAIL

SEQ ID NO: 15909 - protein, 21 aa, Bos taurus
VTVIVGLLIHAVIVLPLLYFL

SEQ ID NO: 15910 - protein, 20 aa, Bos taurus
IALCHFFFNISGIILWYPIP

SEQ ID NO: 15911 - protein, 19 aa, Bos taurus
LVVVALLCVPWMLLFKPLV

SEQ ID NO: 15912 - protein, 20 aa, Bos taurus
GLWGFNSSLACIAIGGTFMA

SEQ ID NO: 15913 - protein, 21 aa, Bos taurus
ATVLSGLAIHSIVILPLIYFI

SEQ ID NO: 15914 - protein, 20 aa, Bos taurus
WSAWVILGAISVYDLVAVLC

SEQ ID NO: 15915 - protein, 20 aa, Bos taurus
GLVSDFFLQMLFFTTVLSID

SEQ ID NO: 15916 - protein, 19 aa, Bos taurus
LLLITVLSVPVLFLGKPLF

SEQ ID NO: 15917 - protein, 20 aa, Bos taurus
GTSVLSPGLHIGIIIILAIM

SEQ ID NO: 15918 - protein, 21 aa, Bos taurus
LCCLLGHAIHGLLTLPLIYFL

SEQ ID NO: 15919 - protein, 20 aa, Bos taurus
FMVIFIMVFVAFMIGMFNLY

SEQ ID NO: 15920 - protein, 20 aa, Bos taurus
LFLLQFTLSCVMGFILMYAT

SEQ ID NO: 15921 - protein, 20 aa, Bos taurus
GPSLNKENFIGLLVFVLSLS

SEQ ID NO: 15922 - protein, 20 aa, Bos taurus
AAKLQLSTALGGLLGACFAI

SEQ ID NO: 15923 - protein, 20 aa, Bos taurus
MILQFGFTTIFVAAFPLAPL

SEQ ID NO: 15924 - protein, 19 aa, Bos taurus
SWTGTLFGVLASLCVSLNA

SEQ ID NO: 15925 - protein, 20 aa, Bos taurus
VVVSSVFLLTLSIAFICCAQ

SEQ ID NO: 15926 - protein, 20 aa, Bos taurus
IAILMNFISALTAFIGLYIG

SEQ ID NO: 15927 - protein, 20 aa, Bos taurus
WLSGFSVAMLGALSLVGVNS

SEQ ID NO: 15928 - protein, 20 aa, Bos taurus
VVAGCGILFSCMTPLGIGLG

SEQ ID NO: 15929 - protein, 20 aa, Bos taurus
AKLAVTVSAMIPLGISLGLG

SEQ ID NO: 15930 - protein, 20 aa, Bos taurus
LTWIVVVLQALGGLVIAAVI

SEQ ID NO: 15931 - protein, 20 aa, Bos taurus
LWSTLLLGAGILFTGELWEF

SEQ ID NO: 15932 - protein, 20 aa, Bos taurus
AIGFCNIIPSFFHCFTTSAA

SEQ ID NO: 15933 - protein, 20 aa, Bos taurus
LNHLGLVLLVLHYFVEFLFH

SEQ ID NO: 15934 - protein, 20 aa, Bos taurus
LIGLIWTSEFILACQQMAVA

SEQ ID NO: 15935 - protein, 20 aa, Bos taurus
LPLALQNLFLYSFGVLLNLG

SEQ ID NO: 15936 - protein, 20 aa, Bos taurus
FDHRVLGIASVTAVTVLYFL

SEQ ID NO: 15937 - protein, 20 aa, Bos taurus
LPIVLVGFTVPLVGLLVGYG

SEQ ID NO: 15938 - protein, 20 aa, Bos taurus
CEHLIMVWINAFVMLTTQLL

SEQ ID NO: 15939 - protein, 20 aa, Bos taurus
LFLLVSISTSVILMQHLLPA

SEQ ID NO: 15940 - protein, 20 aa, Bos taurus
LFFVLYGVLALAFLSGYYVT

SEQ ID NO: 15941 - protein, 20 aa, Bos taurus
IFTSILGHFIHGGIVLPLIY

SEQ ID NO: 15942 - protein, 20 aa, Bos taurus
IGAIAGGLLFLVVTGAGMVL

SEQ ID NO: 15943 - protein, 20 aa, Bos taurus
LVLSVTLTGTAIYQVALLLL

SEQ ID NO: 15944 - protein, 20 aa, Bos taurus
FLITCFLFSFAIGFYLLLKW

SEQ ID NO: 15945 - protein, 37 aa, Bos taurus
YSRIVERLLKLAVPNHLIWLIFFYWLFHSCLNAVAEL

SEQ ID NO: 15946 - protein, 23 aa, Bos taurus
ILAVISVYDLVAVLCPKGPLRML

SEQ ID NO: 15947 - protein, 20 aa, Bos taurus
IIWGIFFIFVALLFVISLFL

SEQ ID NO: 15948 - protein, 20 aa, Bos taurus
VGGFLPFSAISVELYYIFAT

SEQ ID NO: 15949 - protein, 20 aa, Bos taurus
GILMAGILPFGAMFIELFFI

SEQ ID NO: 15950 - protein, 20 aa, Bos taurus
FYGLTSLALLLGASLIYWTL

SEQ ID NO: 15951 - protein, 20 aa, Bos taurus
GFPAVLGTHLPFFIHGCFLA

SEQ ID NO: 15952 - protein, 20 aa, Bos taurus
VAGIYLFMIIWQLTELNTFF

SEQ ID NO: 15953 - protein, 20 aa, Bos taurus
GYFFSIYCVWKIFMATINIV

SEQ ID NO: 15954 - protein, 20 aa, Bos taurus
RICPAFFLSIPYTCLPVWAG

SEQ ID NO: 15955 - protein, 20 aa, Bos taurus
TNILVYITICSVIGAVSVSC

SEQ ID NO: 15956 - protein, 20 aa, Bos taurus
GTVTILCIDLGTDMVPAISL

SEQ ID NO: 15957 - protein, 20 aa, Bos taurus
WCIGLYNVIFTALPPFTLGI

SEQ ID NO: 15958 - protein, 20 aa, Bos taurus
AVQMLWVNLIMDTFASLALA

SEQ ID NO: 15959 - protein, 20 aa, Bos taurus
WACFIVSILMIGLLTAFIGD

SEQ ID NO: 15960 - protein, 20 aa, Bos taurus
NAMQILWINIIMDGPPAQSL

SEQ ID NO: 15961 - protein, 20 aa, Bos taurus
GTVTILCIDLGTDMVPAISL

SEQ ID NO: 15962 - protein, 20 aa, Bos taurus
IPVQLLWVNLVTDGLPATAL

SEQ ID NO: 15963 - protein, 19 aa, Bos taurus
WCIGLYNVMFTAMPPLTLG

SEQ ID NO: 15964 - protein, 20 aa, Bos taurus
LALGLVYLVGYTLLSPHITE

SEQ ID NO: 15965 - protein, 20 aa, Bos taurus
GFLMVGYATVYTMFPVFSLV

SEQ ID NO: 15966 - protein, 20 aa, Bos taurus
WVLALGQCVLAGAFASFYWA

SEQ ID NO: 15967 - protein, 22 aa, Bos taurus
NGFGIFLFIIYPGAFVDLFTTH

SEQ ID NO: 15968 - protein, 30 aa, Bos taurus
IPIFIAMGVVGGILGAVFNALNYWLTMFRI

SEQ ID NO: 15969 - protein, 20 aa, Bos taurus
LEAGQSLVISASIIVFNLVE

SEQ ID NO: 15970 - protein, 22 aa, Bos taurus
NFVLALGQVTLAGAFASYYWAM

SEQ ID NO: 15971 - protein, 20 aa, Bos taurus
LGLGHVLIIVQCFISSMANI

SEQ ID NO: 15972 - protein, 22 aa, Bos taurus
LFTAMIFGCALCVTLPMSLLNF

SEQ ID NO: 15973 - protein, 20 aa, Bos taurus
NLMNLIATVFVFAVVIYFQG

SEQ ID NO: 15974 - protein, 20 aa, Bos taurus
LPFIAAASCTILGGQLADFL

SEQ ID NO: 15975 - protein, 20 aa, Bos taurus
FISVNMLLCLGASIMSILPK

SEQ ID NO: 15976 - protein, 20 aa, Bos taurus
NLMNLIATIFVFAVVIYFQG

SEQ ID NO: 15977 - protein, 20 aa, Bos taurus
FLGTVFAALGVLVTSLYQVW

SEQ ID NO: 15978 - protein, 20 aa, Bos taurus
TIGSIWSLVGAMLYAVYIVM

SEQ ID NO: 15979 - protein, 20 aa, Bos taurus
CSLAVISGILYGSTFVPIIY

SEQ ID NO: 15980 - protein, 20 aa, Bos taurus
WASLLLLFTGVAIVQAQQAG

SEQ ID NO: 15981 - protein, 20 aa, Bos taurus
IFPSINLNLILTLSVLSILI

SEQ ID NO: 15982 - protein, 20 aa, Bos taurus
QAIYLFLLPIVFPLWLTVPD

SEQ ID NO: 15983 - protein, 20 aa, Bos taurus
VYAVPILTFSFVCHPAILPI

SEQ ID NO: 15984 - protein, 20 aa, Bos taurus
LGLPKANSTSILLFLTAMVA

SEQ ID NO: 15985 - protein, 20 aa, Bos taurus
MFYTVPIMAFAFVCHPEVLP

SEQ ID NO: 15986 - protein, 20 aa, Bos taurus
LAFFLTADIFLALCIGLYLL

SEQ ID NO: 15987 - protein, 20 aa, Bos taurus
LSVVATFLIEIAVPPLFFAP

SEQ ID NO: 15988 - protein, 20 aa, Bos taurus
ASWIAVFNAMPTICFGFQCH

SEQ ID NO: 15989 - protein, 20 aa, Bos taurus
PLATFICTLIAMLPSVFCLW

SEQ ID NO: 15990 - protein, 20 aa, Bos taurus
FAWHVVWLSVIQLWHYLFIG

SEQ ID NO: 15991 - protein, 19 aa, Bos taurus
NIWKNLLILGFTNFIAHAI

SEQ ID NO: 15992 - protein, 20 aa, Bos taurus
VVSFAALVAYSFQVTGYQPF

SEQ ID NO: 15993 - protein, 20 aa, Bos taurus
LVFFLLLSFMMACCFISFFF

SEQ ID NO: 15994 - protein, 20 aa, Bos taurus
TLLGIYTGCGFLAVLLMAVF

SEQ ID NO: 15995 - protein, 20 aa, Bos taurus
LLLFTMITYFFVTIGVSPIF

SEQ ID NO: 15996 - protein, 20 aa, Bos taurus
VPWLALLFAVSDLLFIWCFL

SEQ ID NO: 15997 - protein, 20 aa, Bos taurus
AFCLALATGSGLGFVGAARL

SEQ ID NO: 15998 - protein, 20 aa, Bos taurus
LFFFTLLFYALSITAVALLF

SEQ ID NO: 15999 - protein, 20 aa, Bos taurus
VGVMSFAFICHHNCFLVYGS

SEQ ID NO: 16000 - protein, 20 aa, Bos taurus
VFYVYGSFGIFWYLFWLLVS

SEQ ID NO: 16001 - protein, 20 aa, Bos taurus
VFYVYGSFGMIWYMFWLLVS

SEQ ID NO: 16002 - protein, 20 aa, Bos taurus
FVTGYAIPAVCIGVAFVVFL

SEQ ID NO: 16003 - protein, 33 aa, Bos taurus
PILYQHLFWFFGHPEVYILILPGFGMISHIVTY

SEQ ID NO: 16004 - protein, 20 aa, Bos taurus
LGANALLFLGVNVYGIFVRI

SEQ ID NO: 16005 - protein, 20 aa, Bos taurus
WPLLLSVIFIPALLQCILLP

SEQ ID NO: 16006 - protein, 17 aa, Bos taurus
ICFSLGVGLGVLIAFSS

SEQ ID NO: 16007 - protein, 18 aa, Bos taurus
ISFCIVLRMAVTRQFPWA

SEQ ID NO: 16008 - protein, 20 aa, Bos taurus
WHILLGLSAVPAILQCLLLF

SEQ ID NO: 16009 - protein, 20 aa, Bos taurus
PILLGLTGIPAVLQLLFLPF

SEQ ID NO: 16010 - protein, 20 aa, Bos taurus
WLAVLGCVPPSFMLLLMCFM

SEQ ID NO: 16011 - protein, 18 aa, Bos taurus
VNPFWLALAVLTVMTLYA

SEQ ID NO: 16012 - protein, 20 aa, Bos taurus
LWPLLLGITVLPALLQMVLL

SEQ ID NO: 16013 - protein, 19 aa, Bos taurus
LLFGSIISAVDPVAVLAVF

SEQ ID NO: 16014 - protein, 20 aa, Bos taurus
VGLKLLATAVVFVCGNLTGA

SEQ ID NO: 16015 - protein, 20 aa, Bos taurus
YVPDVLFWSVILFFSTVTLS

SEQ ID NO: 16016 - protein, 17 aa, Bos taurus
TLMSFILFLGTYTSSMA

SEQ ID NO: 16017 - protein, 17 aa, Bos taurus
IFFSYAICLGAMTSLGS

SEQ ID NO: 16018 - protein, 22 aa, Bos taurus
VWVDAAAQIFFSLGPGFGVLLA

SEQ ID NO: 16019 - protein, 20 aa, Bos taurus
AGTQIFFSFAICLGCLTALG

SEQ ID NO: 16020 - protein, 20 aa, Bos taurus
WLQLAVSLPIFLLLFRFWFV

SEQ ID NO: 16021 - protein, 25 aa, Bos taurus
VWIDAATQIFFSLGAGFGVLIAFAS

SEQ ID NO: 16022 - protein, 20 aa, Bos taurus
WPLLLGFTILPAIIQCAALP

SEQ ID NO: 16023 - protein, 22 aa, Bos taurus
TAPFLVLAALVLLDGAIQLFVL

SEQ ID NO: 16024 - protein, 17 aa, Bos taurus
IFYSLGCAWGGLVTMAS

SEQ ID NO: 16025 - protein, 20 aa, Bos taurus
VFVLVCAFPSVFAIGALTTQ

SEQ ID NO: 16026 - protein, 20 aa, Bos taurus
YMFGLVIPLGVLQAIAMYFL

SEQ ID NO: 16027 - protein, 20 aa, Bos taurus
YLQLLVSAPFFAFFIYSWFF

SEQ ID NO: 16028 - protein, 24 aa, Bos taurus
GAWWGGFLLCGALLFFSSVLMFGF

SEQ ID NO: 16029 - protein, 20 aa, Bos taurus
GGSMTIHTFGAYFGLILSRV

SEQ ID NO: 16030 - protein, 17 aa, Bos taurus
VFFALGLGFGGVIAFSS

SEQ ID NO: 16031 - protein, 20 aa, Bos taurus
IAINVFSIMYTGAPVMGLVL

SEQ ID NO: 16032 - protein, 20 aa, Bos taurus
VWIDAGTQIFFSYAIGLGAL

SEQ ID NO: 16033 - protein, 18 aa, Bos taurus
LQALLMIVGALTLMVISM

SEQ ID NO: 16034 - protein, 20 aa, Bos taurus
FGASFIVILVVWAGCSGLVF

SEQ ID NO: 16035 - protein, 20 aa, Bos taurus
WIYQIVLSSVTVPFVLCCWM

SEQ ID NO: 16036 - protein, 20 aa, Bos taurus
LLLVSALSLHLVACGALLRP

SEQ ID NO: 16037 - protein, 20 aa, Bos taurus
WLLILSAVPLLLFAVLCFWL

SEQ ID NO: 16038 - protein, 20 aa, Bos taurus
LMIGGITCILSLVCALALAY

SEQ ID NO: 16039 - protein, 20 aa, Bos taurus
FFFTLIAVKLITSLLLLICP

SEQ ID NO: 16040 - protein, 18 aa, Bos taurus
LLQAVGIIGAIIMPHNIY

SEQ ID NO: 16041 - protein, 20 aa, Bos taurus
TLQLVFSVPLFVLFLSSRWL

SEQ ID NO: 16042 - protein, 20 aa, Bos taurus
GGSMTIHAFGAYFGLTVAWI

SEQ ID NO: 16043 - protein, 19 aa, Bos taurus
YLLMAMVIVLPHVSKAAGW

SEQ ID NO: 16044 - protein, 20 aa, Bos taurus
AFFMIYGWRGSFLILGGLLL

SEQ ID NO: 16045 - protein, 20 aa, Bos taurus
SFVVPGVITAIMGIITFFFL

SEQ ID NO: 16046 - protein, 20 aa, Bos taurus
GESMTIHAFGAYFGLAVAGI

SEQ ID NO: 16047 - protein, 20 aa, Bos taurus
FLALPNLVIFAVLLFFSSLE

SEQ ID NO: 16048 - protein, 20 aa, Bos taurus
LVVLVATVVALLDICFILLA

SEQ ID NO: 16049 - protein, 20 aa, Bos taurus
WLLLTVTLPCVPGILTLWWV

SEQ ID NO: 16050 - protein, 20 aa, Bos taurus
WALRVTPGLGVLAVVLLFLV

SEQ ID NO: 16051 - protein, 20 aa, Bos taurus
LGPVAPFVAAIPLLALAGAL

SEQ ID NO: 16052 - protein, 20 aa, Bos taurus
FLVTAAVQFAGGIIIFFGLL

SEQ ID NO: 16053 - protein, 20 aa, Bos taurus
FLMSMKMMLLDAALYGLLAW

SEQ ID NO: 16054 - protein, 20 aa, Bos taurus
WLACMMAFMVKMPLYGLHLW

SEQ ID NO: 16055 - protein, 16 aa, Bos taurus
YVFLINLIPLHVLVLM

SEQ ID NO: 16056 - protein, 20 aa, Bos taurus
VVWTDAFQMVVMIVGFLTVL

SEQ ID NO: 16057 - protein, 20 aa, Bos taurus
IMYLGSGLCCVGALAGLSTQ

SEQ ID NO: 16058 - protein, 20 aa, Bos taurus
LIMLIGALILMGYSFAAVGG

SEQ ID NO: 16059 - protein, 20 aa, Bos taurus
LVMVAGAVILTIKAFEQIGG

SEQ ID NO: 16060 - protein, 20 aa, Bos taurus
AILYNRIGDIGFILAMAWFL

SEQ ID NO: 16061 - protein, 20 aa, Bos taurus
WSGVLQGAATCFYAFIGFDI

SEQ ID NO: 16062 - protein, 20 aa, Bos taurus
FTPGEALLVLGGISFMLNQL

SEQ ID NO: 16063 - protein, 20 aa, Bos taurus
IPVFLVIVFLMSVGTLYEKQ

SEQ ID NO: 16064 - protein, 20 aa, Bos taurus
LYKTFGPYFLMSFLFKAVHD

SEQ ID NO: 16065 - protein, 9 aa, Bos taurus
LKLTFDSSF

SEQ ID NO: 16066 - protein, 9 aa, Bos taurus
LKLTFDTTF

SEQ ID NO: 16067 - protein, 9 aa, Bos taurus
LKLTLDTIF

SEQ ID NO: 16068 - protein, 26 aa, Bos taurus
PNPVTQRVKMIMSLGLVLVHAHSRWI

SEQ ID NO: 16069 - protein, 20 aa, Bos taurus
LSQCLFWALVADLLTLTWIG

SEQ ID NO: 16070 - protein, 20 aa, Bos taurus
ELYTINFTIKSLLLTMSFLW

SEQ ID NO: 16071 - protein, 26 aa, Bos taurus
VTRFVLPVGATINMDGTALYEALAAI

SEQ ID NO: 16072 - protein, 20 aa, Bos taurus
WFAIVYLIVFFLLIPLAVFG

SEQ ID NO: 16073 - protein, 24 aa, Bos taurus
IEYCLGCISNTASYLRLWALSLAH

SEQ ID NO: 16074 - protein, 20 aa, Bos taurus
LLALACALFTAYLGASMSHV

SEQ ID NO: 16075 - protein, 26 aa, Bos taurus
ITRFVLPVGATINMDGTALYEAVAAV

SEQ ID NO: 16076 - protein, 20 aa, Bos taurus
LGLGDFIFYSVLVGKAAATG

SEQ ID NO: 16077 - protein, 20 aa, Bos taurus
LIMAGTVVWIGILVYTDPAG

SEQ ID NO: 16078 - protein, 24 aa, Bos taurus
IEYCLGCISNTASYLRLWALSLAH

SEQ ID NO: 16079 - protein, 20 aa, Bos taurus
CLYTLMFGCVFAKVSQKLVI

SEQ ID NO: 16080 - protein, 26 aa, Bos taurus
ISRFILPIGATVNMDGAALFQCVAAV

SEQ ID NO: 16081 - protein, 20 aa, Bos taurus
FKTLFWAIFGLSEVKSVVIN

SEQ ID NO: 16082 - protein, 22 aa, Bos taurus
SALTTTIVGCIKNILITYIGMV

SEQ ID NO: 16083 - protein, 20 aa, Bos taurus
MFHLMLCSASLYIMMTLTNW

SEQ ID NO: 16084 - protein, 20 aa, Bos taurus
VAWILPFTSGGFLYIALVNV

SEQ ID NO: 16085 - protein, 20 aa, Bos taurus
IWYGILEGIGILSVITNAFV

SEQ ID NO: 16086 - protein, 22 aa, Bos taurus
IWRLTFYNNANACVLFLPLLLA

SEQ ID NO: 16087 - protein, 20 aa, Bos taurus
WEFLIWESALLLFLLRLASL

SEQ ID NO: 16088 - protein, 20 aa, Bos taurus
WILTVTAGMFLYLSLVEMLP

SEQ ID NO: 16089 - protein, 20 aa, Bos taurus
MPYYTALAAVGAHLAHQIYT

SEQ ID NO: 16090 - protein, 20 aa, Bos taurus
SVLEGMAAGTFLYITFLEIL

SEQ ID NO: 16091 - protein, 20 aa, Bos taurus
VLLQGLAGGTFLFVTFFEIL

SEQ ID NO: 16092 - protein, 20 aa, Bos taurus
ILKGFATSLSIILSTLISYF

SEQ ID NO: 16093 - protein, 20 aa, Bos taurus
ILLFGLTSALGQSFIFMTVV

SEQ ID NO: 16094 - protein, 20 aa, Bos taurus
VMTALVLLLVLLVIAPLFFS

SEQ ID NO: 16095 - protein, 20 aa, Bos taurus
LWAVLFVLGRLLTLILSVLT

SEQ ID NO: 16096 - protein, 20 aa, Bos taurus
FIIFLGKVLVVCFTVFGGLM

SEQ ID NO: 16097 - protein, 22 aa, Bos taurus
FSGWMALVVLSQALNGLLMSAV

SEQ ID NO: 16098 - protein, 20 aa, Bos taurus
ATTLLALAYTQVGLGISTLL

SEQ ID NO: 16099 - protein, 20 aa, Bos taurus
VSIEVGVQNSLLALAMLQLS

SEQ ID NO: 16100 - protein, 20 aa, Bos taurus
LLNLLILIEGSVVFYQLYSL

SEQ ID NO: 16101 - protein, 20 aa, Bos taurus
ILNILLLLEGAVIVYQLYSL

SEQ ID NO: 16102 - protein, 20 aa, Bos taurus
ILAVLLPPVMLLIDGNVAYW

SEQ ID NO: 16103 - protein, 20 aa, Bos taurus
FLLGLLTPFATAFATCSSSA

SEQ ID NO: 16104 - protein, 20 aa, Bos taurus
IILLMISFIFPLIGHATGFL

SEQ ID NO: 16105 - protein, 20 aa, Bos taurus
SALVLSCLLTFLMLVHSLVT

SEQ ID NO: 16106 - protein, 20 aa, Bos taurus
TTPFASLLKNLGTLFGLGLA

SEQ ID NO: 16107 - protein, 20 aa, Bos taurus
KWAARTAVFLASAFFHEYLV

SEQ ID NO: 16108 - protein, 20 aa, Bos taurus
LGLGDFIFYSVLVGKASATA

SEQ ID NO: 16109 - protein, 20 aa, Bos taurus
LDYILITIIIMYFIFTSMAG

SEQ ID NO: 16110 - protein, 20 aa, Bos taurus
GILFFVFAILLSVGACISIA

SEQ ID NO: 16111 - protein, 20 aa, Bos taurus
FLFLVFIILVVSCSQISIVM

SEQ ID NO: 16112 - protein, 18 aa, Bos taurus
SGAALGLGIALHSPCYAQ

SEQ ID NO: 16113 - protein, 20 aa, Bos taurus
IFLVTVLWTLLVYSMLSHKE

SEQ ID NO: 16114 - protein, 22 aa, Bos taurus
SWCRILFIGGITAPTVRQYYAY

SEQ ID NO: 16115 - protein, 20 aa, Bos taurus
ISFILVGIIIVTSIRGLLIT

SEQ ID NO: 16116 - protein, 20 aa, Bos taurus
LILVLCLLLATGFCVFRGLI

SEQ ID NO: 16117 - protein, 20 aa, Bos taurus
PLTWILLLSLIVCVSTQINY

SEQ ID NO: 16118 - protein, 22 aa, Bos taurus
LVNERLISMAYGQIGMIQALGG

SEQ ID NO: 16119 - protein, 20 aa, Bos taurus
VFWGHCINALVHSLILFWFP

SEQ ID NO: 16120 - protein, 20 aa, Bos taurus
NILGHAVYQLTVIFFLVFAG

SEQ ID NO: 16121 - protein, 20 aa, Bos taurus
FACTIALKDSVTAVVFVALG

SEQ ID NO: 16122 - protein, 19 aa, Bos taurus
LTKNLILKILVSSIIIVCG

SEQ ID NO: 16123 - protein, 22 aa, Bos taurus
LVNERLISMAYGQIGMIQALGG

SEQ ID NO: 16124 - protein, 22 aa, Bos taurus
ISGWLFFRYMAIGGYVGAATVG

SEQ ID NO: 16125 - protein, 21 aa, Bos taurus
FWVHCLNGLFHSVILFWFPLK

SEQ ID NO: 16126 - protein, 20 aa, Bos taurus
VTCWLVTEGVCILTGLGFNG

SEQ ID NO: 16127 - protein, 20 aa, Bos taurus
FLVWVLISIYQGGILMFGAL

SEQ ID NO: 16128 - protein, 20 aa, Bos taurus
LAFGALILTLVQIARVILEY

SEQ ID NO: 16129 - protein, 22 aa, Bos taurus
FILALLGILALILLPVILLPFY

SEQ ID NO: 16130 - protein, 22 aa, Bos taurus
PCLQVVEATLVAAVTATAAFVL

SEQ ID NO: 16131 - protein, 23 aa, Bos taurus
DDHIFSLYFMIPFFFTTLGLLYH

SEQ ID NO: 16132 - protein, 20 aa, Bos taurus
LAFGSLLLAIVQVIRVILEY

SEQ ID NO: 16133 - protein, 20 aa, Bos taurus
IFVQNSKLYFFGVLFNGLTL

SEQ ID NO: 16134 - protein, 22 aa, Bos taurus
VYEAVVPFFSPCLLFILSTAWI

SEQ ID NO: 16135 - protein, 20 aa, Bos taurus
IPIILQSALVSNLYVISQML

SEQ ID NO: 16136 - protein, 22 aa, Bos taurus
LFSSLGLLLPSLCAVALPFVAS

SEQ ID NO: 16137 - protein, 20 aa, Bos taurus
GLLQSSVITVYTMYLTWSAM

SEQ ID NO: 16138 - protein, 20 aa, Bos taurus
IPIILQSALVSNLYVISQML

SEQ ID NO: 16139 - protein, 19 aa, Bos taurus
LLYYQAPMSSAMLLVAVPF

SEQ ID NO: 16140 - protein, 20 aa, Bos taurus
MFFGFVGLFNLLLLWPGFFL

SEQ ID NO: 16141 - protein, 20 aa, Bos taurus
IFAHFSGIFLTSTVYFLAYC

SEQ ID NO: 16142 - protein, 20 aa, Bos taurus
GVGLAAVVASCLSSGFAGVY

SEQ ID NO: 16143 - protein, 20 aa, Bos taurus
IMAYSSIAHMGWMTAVLPYN

SEQ ID NO: 16144 - protein, 20 aa, Bos taurus
FFVITFLGSILWIAMFSYLM

SEQ ID NO: 16145 - protein, 20 aa, Bos taurus
ISFFAMFLMYLLAALFGYLT

SEQ ID NO: 16146 - protein, 20 aa, Bos taurus
EVLIESFSLALVSSSLLVFL

SEQ ID NO: 16147 - protein, 20 aa, Bos taurus
VSIGAMFCMYGLTATFGYLT

SEQ ID NO: 16148 - protein, 20 aa, Bos taurus
GLGFCIIYLFFITSLIFPAI

SEQ ID NO: 16149 - protein, 20 aa, Bos taurus
VLLQVLIILTGNYNFFNLLT

SEQ ID NO: 16150 - protein, 20 aa, Bos taurus
AAMVIALAVYMGTGICGFLT

SEQ ID NO: 16151 - protein, 20 aa, Bos taurus
LCALSSFMFGWHVHEKAILL

SEQ ID NO: 16152 - protein, 20 aa, Bos taurus
NAFAVTQFFGVLCAPWNGLL

SEQ ID NO: 16153 - protein, 20 aa, Bos taurus
FYLCSLLASGTAALACVFLG

SEQ ID NO: 16154 - protein, 20 aa, Bos taurus
GMGAGLVVVPLMGLLESIAV

SEQ ID NO: 16155 - protein, 20 aa, Bos taurus
LAHLTFIYVLVAFVNALTNG

SEQ ID NO: 16156 - protein, 20 aa, Bos taurus
LRLLILLPMLSGFEQAFLSG

SEQ ID NO: 16157 - protein, 20 aa, Bos taurus
VLIGYGSALGSVTFFSSFLG

SEQ ID NO: 16158 - protein, 20 aa, Bos taurus
LVYFLYLFLFSGLEFTLSFL

SEQ ID NO: 16159 - protein, 20 aa, Bos taurus
FLWFVGMDLVQVFHCHFNSN

SEQ ID NO: 16160 - protein, 20 aa, Bos taurus
GKVFIGLNLTLCVCVSIVAI

SEQ ID NO: 16161 - protein, 20 aa, Bos taurus
IIHVSTLISVFISILFATCG

SEQ ID NO: 16162 - protein, 20 aa, Bos taurus
PVYAIIVANFCRSWTFYLLL

SEQ ID NO: 16163 - protein, 20 aa, Bos taurus
PVYAIIVANFCRSWTFYLLL

SEQ ID NO: 16164 - protein, 20 aa, Bos taurus
LVKIVPVFLALIPYWTVYFQ

SEQ ID NO: 16165 - protein, 16 aa, Bos taurus
YMGMVWAMMSIGFLGF

SEQ ID NO: 16166 - protein, 20 aa, Bos taurus
SAVVLALILAALFGLVYLLI

SEQ ID NO: 16167 - protein, 21 aa, Bos taurus
ILIAVVLQLSQQLSGINAVFY

SEQ ID NO: 16168 - protein, 21 aa, Bos taurus
IITTSVNSLTSFSSGFVVFSF

SEQ ID NO: 16169 - protein, 20 aa, Bos taurus
LMFVLIWCLVVFLVEVAASL

SEQ ID NO: 16170 - protein, 20 aa, Bos taurus
ILVALMLHAAQQFSGINGIF

SEQ ID NO: 16171 - protein, 20 aa, Bos taurus
VISIIVLMAGQQLSGVNAIY

SEQ ID NO: 16172 - protein, 20 aa, Bos taurus
FIIGISLMAFQQLSGVNAVM

SEQ ID NO: 16173 - protein, 22 aa, Bos taurus
LALYSLAIFVMITVHLGAQDIL

SEQ ID NO: 16174 - protein, 20 aa, Bos taurus
LVIAIVLQLSQQLSGINAVF

SEQ ID NO: 16175 - protein, 19 aa, Bos taurus
ILVFGESLLNDAVTVVLYH

SEQ ID NO: 16176 - protein, 20 aa, Bos taurus
YYFACASLVFVCILLIHVLL

SEQ ID NO: 16177 - protein, 20 aa, Bos taurus
FAVFLTILCMVLIDYAIGIP

SEQ ID NO: 16178 - protein, 19 aa, Bos taurus
LISDFAIILPILIFCVIDA

SEQ ID NO: 16179 - protein, 21 aa, Bos taurus
MLLGCLNSGTSFVSGFAIFSI

SEQ ID NO: 16180 - protein, 19 aa, Bos taurus
ALVTSAVNCMTSFVSGFVI

SEQ ID NO: 16181 - protein, 20 aa, Bos taurus
FLNSGTSFVAGFAIFSILGF

SEQ ID NO: 16182 - protein, 20 aa, Bos taurus
FILMYLWFTSSVVYQGLIMH

SEQ ID NO: 16183 - protein, 23 aa, Bos taurus
CYRDALLTSTINCVTSFISGFAI

SEQ ID NO: 16184 - protein, 20 aa, Bos taurus
IIISIMLQLSQQLSGINAVF

SEQ ID NO: 16185 - protein, 19 aa, Bos taurus
PYILIAAGSICFANMGIAM

SEQ ID NO: 16186 - protein, 21 aa, Bos taurus
VIISITNCATSVYAGFVIFSI

SEQ ID NO: 16187 - protein, 20 aa, Bos taurus
LMMMGVWFTMSFSYYGLTVW

SEQ ID NO: 16188 - protein, 20 aa, Bos taurus
IMIGLTLVFFVQITGQPNIL

SEQ ID NO: 16189 - protein, 20 aa, Bos taurus
LFLCLSMLWFATSFAYYGLV

SEQ ID NO: 16190 - protein, 21 aa, Bos taurus
LLSNPVFTCIILAACMEIAVV

SEQ ID NO: 16191 - protein, 20 aa, Bos taurus
LFAMIGTIFLWIFWPSFNSA

SEQ ID NO: 16192 - protein, 21 aa, Bos taurus
VLVSFINFFTSILATLVVFAV

SEQ ID NO: 16193 - protein, 20 aa, Bos taurus
AIALISFGVALLFALFVWLF

SEQ ID NO: 16194 - protein, 20 aa, Bos taurus
IILALINSGTSFFAGFVVFS

SEQ ID NO: 16195 - protein, 20 aa, Bos taurus
FLKLLPMFIIVVPGMISRIL

SEQ ID NO: 16196 - protein, 20 aa, Bos taurus
PSFMHSVFSPILLLSLVTMC

SEQ ID NO: 16197 - protein, 20 aa, Bos taurus
TLILWLIWFTGCLGFYTFSL

SEQ ID NO: 16198 - protein, 20 aa, Bos taurus
VALTLINTGYFIPYVHLVAH

SEQ ID NO: 16199 - protein, 20 aa, Bos taurus
TLLLWFIWFSNAFSYYGLVL

SEQ ID NO: 16200 - protein, 20 aa, Bos taurus
WLIFIICVCYYVAIFPFIGL

SEQ ID NO: 16201 - protein, 20 aa, Bos taurus
SWVVAISIAALYQLALDFTP

SEQ ID NO: 16202 - protein, 19 aa, Bos taurus
ATIALSVSFLINLFVMAVF

SEQ ID NO: 16203 - protein, 18 aa, Bos taurus
ICLLSFVRFANFMSFFGL

SEQ ID NO: 16204 - protein, 20 aa, Bos taurus
LFAMIGTLFLWMYWPSFNSA

SEQ ID NO: 16205 - protein, 24 aa, Bos taurus
KERVEAFSDGVYAIVATLLILDIC

SEQ ID NO: 16206 - protein, 20 aa, Bos taurus
FLLYLSGNVLMFFGLFTPLV

SEQ ID NO: 16207 - protein, 20 aa, Bos taurus
LCLLFAKLVSYTFLYWLPLY

SEQ ID NO: 16208 - protein, 20 aa, Bos taurus
LFAMIGSLFLWIFWPSFNSA

SEQ ID NO: 16209 - protein, 20 aa, Bos taurus
PVAFACFFICLITDPFLDIY

SEQ ID NO: 16210 - protein, 20 aa, Bos taurus
STILLICITVFLSYLPEAGQ

SEQ ID NO: 16211 - protein, 20 aa, Bos taurus
ISLCCMVVWFGVNFSYYGVS

SEQ ID NO: 16212 - protein, 20 aa, Bos taurus
LGFTAVAFVTGSLALWAPAF

SEQ ID NO: 16213 - protein, 20 aa, Bos taurus
VLLLGTIQALFESVIFIFVF

SEQ ID NO: 16214 - protein, 20 aa, Bos taurus
LAYACLKLVNYSFFFWLPFY

SEQ ID NO: 16215 - protein, 20 aa, Bos taurus
IVLPATFVFLALMLSLIIPP

SEQ ID NO: 16216 - protein, 20 aa, Bos taurus
PIAGSMVLAAVLLKLGGYGM

SEQ ID NO: 16217 - protein, 25 aa, Bos taurus
HRIYVAYCTVYCLGTILSMQISFVG

SEQ ID NO: 16218 - protein, 20 aa, Bos taurus
HTFWTISVGGTFTWLGIYGV

SEQ ID NO: 16219 - protein, 20 aa, Bos taurus
LGNALGMIGVAGGLAATLGG

SEQ ID NO: 16220 - protein, 20 aa, Bos taurus
GILFGMSIPSLWYWCTDQVI

SEQ ID NO: 16221 - protein, 20 aa, Bos taurus
GMTFGLTIMAAWYWCTDQVI

SEQ ID NO: 16222 - protein, 20 aa, Bos taurus
LIGLALAATGKSAQFGLHPW

SEQ ID NO: 16223 - protein, 20 aa, Bos taurus
ASLVICLTAYVSVSMILTLM

SEQ ID NO: 16224 - protein, 20 aa, Bos taurus
FFLLVVVVGMVLMGIFFSTL

SEQ ID NO: 16225 - protein, 20 aa, Bos taurus
LPGQVISMAASTLATLAISI

SEQ ID NO: 16226 - protein, 20 aa, Bos taurus
YFYTALLFISACLQTLVLHQ

SEQ ID NO: 16227 - protein, 9 aa, Bos taurus
NAKIKTGYK

SEQ ID NO: 16228 - protein, 9 aa, Bos taurus
SGKIKSSYK

SEQ ID NO: 16229 - protein, 9 aa, Bos taurus
SGKLKASYK

SEQ ID NO: 16230 - protein, 20 aa, Bos taurus
IGATVNMDGAAIFQCVAAVF

SEQ ID NO: 16231 - protein, 20 aa, Bos taurus
ISLETGTQNVQMCFTMLQLS

SEQ ID NO: 16232 - protein, 20 aa, Bos taurus
FTAYQTAFTCLGLLVQQILF

SEQ ID NO: 16233 - protein, 20 aa, Bos taurus
FPFRLSCIVASLVLLHLFDS

SEQ ID NO: 16234 - protein, 18 aa, Bos taurus
WAFTGMMAQIPLAWIVGR

SEQ ID NO: 16235 - protein, 20 aa, Bos taurus
IACFVAILIGLCLTLLLLAI

SEQ ID NO: 16236 - protein, 20 aa, Bos taurus
ALLFLCMILLLIVLHTSYMI

SEQ ID NO: 16237 - protein, 20 aa, Bos taurus
SVLSVGSTGLFIFLYSVFYY

SEQ ID NO: 16238 - protein, 20 aa, Bos taurus
NFLVSGGSAFYVLVYAIFYF

SEQ ID NO: 16239 - protein, 20 aa, Bos taurus
LVCLVLAMGLLGPLNWLGYP

SEQ ID NO: 16240 - protein, 20 aa, Bos taurus
FIYPVLPFCMVFCGYSLNNL

SEQ ID NO: 16241 - protein, 20 aa, Bos taurus
VFGVIGFLEAIVCIKFGQDL

SEQ ID NO: 16242 - protein, 20 aa, Bos taurus
VIVLLLAQIMGMYFVSSVLL

SEQ ID NO: 16243 - protein, 20 aa, Bos taurus
MLAYLFYSVPYFVIALYGLV

SEQ ID NO: 16244 - protein, 20 aa, Bos taurus
IVTPIYYVFFTTSVITCSAI

SEQ ID NO: 16245 - protein, 19 aa, Bos taurus
HTAFFASIVVVQWADLIIC

SEQ ID NO: 16246 - protein, 20 aa, Bos taurus
LFVGNIVYTYVVVTVCLKAG

SEQ ID NO: 16247 - protein, 19 aa, Bos taurus
QHYTIIFNTFVLMQLFNEI

SEQ ID NO: 16248 - protein, 20 aa, Bos taurus
AVNVFLGIGVAWSIAAIYHA

SEQ ID NO: 16249 - protein, 19 aa, Bos taurus
TMTFTCFVFFDMFNALSSR

SEQ ID NO: 16250 - protein, 19 aa, Bos taurus
HTAFFVSIVVVQWADLVIC

SEQ ID NO: 16251 - protein, 19 aa, Bos taurus
TMALSVLVTIEMCNALNSL

SEQ ID NO: 16252 - protein, 22 aa, Bos taurus
YLLLGNFVYTFVVITVCLKAGL

SEQ ID NO: 16253 - protein, 20 aa, Bos taurus
GLSLLFLALWHGLHSGYLVC

SEQ ID NO: 16254 - protein, 20 aa, Bos taurus
VVAISFTALVLTELLMVALT

SEQ ID NO: 16255 - protein, 20 aa, Bos taurus
IMIAIYGKNFCVSAKNAFML

SEQ ID NO: 16256 - protein, 17 aa, Bos taurus
YLISLSGALAIVNAVPC

SEQ ID NO: 16257 - protein, 20 aa, Bos taurus
PMTLGLFTLVYFFLACWTYG

SEQ ID NO: 16258 - protein, 18 aa, Bos taurus
GDTFCYFAGMTFAVVGIL

SEQ ID NO: 16259 - protein, 20 aa, Bos taurus
IMIAIYGTNFCTSARNAFFL

SEQ ID NO: 16260 - protein, 20 aa, Bos taurus
AFSVALIFVTAFQGLSVAFI

SEQ ID NO: 16261 - protein, 19 aa, Bos taurus
VFYLMVGTAFANSTCQLIV

SEQ ID NO: 16262 - protein, 20 aa, Bos taurus
FEDPVHVVVYIIFMLGSCAF

SEQ ID NO: 16263 - protein, 22 aa, Bos taurus
IILLILIPGTSNLCDSGFIINT

SEQ ID NO: 16264 - protein, 20 aa, Bos taurus
VQWWHTQGIIGLILFLLCVF

SEQ ID NO: 16265 - protein, 20 aa, Bos taurus
LEDPVHAVVYIVFMLGSCAF

SEQ ID NO: 16266 - protein, 20 aa, Bos taurus
LMVLLSGVIAFMVNLSIYWI

SEQ ID NO: 16267 - protein, 20 aa, Bos taurus
VVLMCIVINGLIGTVLSEFL

SEQ ID NO: 16268 - protein, 20 aa, Bos taurus
AVLPGFLSGVLWAIATCCWF

SEQ ID NO: 16269 - protein, 20 aa, Bos taurus
LGLFGTALGLVGLWWAEGTA

SEQ ID NO: 16270 - protein, 20 aa, Bos taurus
MTLLNLIIYIIMTSTMFTMF

SEQ ID NO: 16271 - protein, 20 aa, Bos taurus
IMGLTILAAGTSIPDLITSV

SEQ ID NO: 16272 - protein, 20 aa, Bos taurus
LLIVRLAVLVAVTLTVPVVI

SEQ ID NO: 16273 - protein, 20 aa, Bos taurus
LIAIGLCNVVSSFFRSYVFT

SEQ ID NO: 16274 - protein, 20 aa, Bos taurus
ILCVRLAVLLAVTLTVPVVL

SEQ ID NO: 16275 - protein, 17 aa, Bos taurus
WSTKFFVPLTTFLLYNF

SEQ ID NO: 16276 - protein, 20 aa, Bos taurus
LAMLTLLLELAVYGLLACGV

SEQ ID NO: 16277 - protein, 20 aa, Bos taurus
MAVAVARAFIILSVLTSYPI

SEQ ID NO: 16278 - protein, 20 aa, Bos taurus
VLPMSLLSVGKAVDASIFLI

SEQ ID NO: 16279 - protein, 22 aa, Bos taurus
AAALRSVVPSLTLTSLLSLGFA

SEQ ID NO: 16280 - protein, 20 aa, Bos taurus
GILLLSMTLTGIASLALLGL

SEQ ID NO: 16281 - protein, 20 aa, Bos taurus
LLALGFTNILGSLFSSYPVT

SEQ ID NO: 16282 - protein, 20 aa, Bos taurus
LSATLSSMASPLTCFLSIFL

SEQ ID NO: 16283 - protein, 20 aa, Bos taurus
FVGYVMICFGAADALCSVLF

SEQ ID NO: 16284 - protein, 20 aa, Bos taurus
IHMAFIGTFTTMVGMAMTAF

SEQ ID NO: 16285 - protein, 17 aa, Bos taurus
KMFFFIGLTMATIQGAY

SEQ ID NO: 16286 - protein, 20 aa, Bos taurus
FLLGISYVAPHLNNLYFLPL

SEQ ID NO: 16287 - protein, 20 aa, Bos taurus
SGLLQASVITLYTMFVTWLA

SEQ ID NO: 16288 - protein, 22 aa, Bos taurus
VTFGRFCYGVTVILTYPIECFV

SEQ ID NO: 16289 - protein, 20 aa, Bos taurus
LVSALPHLVMTIIVPIGGQI

SEQ ID NO: 16290 - protein, 20 aa, Bos taurus
MLSAVPHLVMTIIVPIGGQI

SEQ ID NO: 16291 - protein, 20 aa, Bos taurus
TFPAAWLTMFDAVLILLLIP

SEQ ID NO: 16292 - protein, 28 aa, Bos taurus
VDTRAYFTSATMIIAIPTGVKVFSWLAT

SEQ ID NO: 16293 - protein, 20 aa, Bos taurus
VAVLLLLVFCICFLVACVLY

SEQ ID NO: 16294 - protein, 21 aa, Bos taurus
VYATIGSGIVNTAFTVVSLFV

SEQ ID NO: 16295 - protein, 19 aa, Bos taurus
LPLSSVWAVVFFVMLLTLG

SEQ ID NO: 16296 - protein, 20 aa, Bos taurus
YVGVADTLLALGLFRGLPLV

SEQ ID NO: 16297 - protein, 20 aa, Bos taurus
VYATIGVGAVNTVFTAVSVF

SEQ ID NO: 16298 - protein, 20 aa, Bos taurus
VQYVTAGTGAVNVLITVCAI

SEQ ID NO: 16299 - protein, 20 aa, Bos taurus
LASVVVGVIQVLFTATAALI

SEQ ID NO: 16300 - protein, 22 aa, Bos taurus
LISYGSAAQQLPYLTSLLGLRL

SEQ ID NO: 16301 - protein, 20 aa, Bos taurus
YATIGAGVVNTVFTLVSVFL

SEQ ID NO: 16302 - protein, 20 aa, Bos taurus
FLSFFVVSLGGVFVGVVYGV

SEQ ID NO: 16303 - protein, 20 aa, Bos taurus
TLGVSFGLVACVLGLVLGLC

SEQ ID NO: 16304 - protein, 20 aa, Bos taurus
PWWTVIAAIIPALLCTILIF

SEQ ID NO: 16305 - protein, 27 aa, Bos taurus
VYLAAAIPALLVTILIFMDQQITAVIV

SEQ ID NO: 16306 - protein, 19 aa, Bos taurus
MPLPTFWSILFFIMLLLLG

SEQ ID NO: 16307 - protein, 21 aa, Bos taurus
FFAIVFFLMLITLGLDSTFAG

SEQ ID NO: 16308 - protein, 20 aa, Bos taurus
VVMLPFSPLWACCFFFMVVL

SEQ ID NO: 16309 - protein, 20 aa, Bos taurus
LDFLYSALVEFPAGFIILVT

SEQ ID NO: 16310 - protein, 25 aa, Bos taurus
FWAIVFFIMLLALGIDSSMGGMEAV

SEQ ID NO: 16311 - protein, 20 aa, Bos taurus
VYATIGAGVVNTIFTVVSVF

SEQ ID NO: 16312 - protein, 23 aa, Bos taurus
QLGVAFLPASVSYLIGTNVFGIL

SEQ ID NO: 16313 - protein, 19 aa, Bos taurus
LPISPLWSLLFFFMLILLG

SEQ ID NO: 16314 - protein, 20 aa, Bos taurus
FVSFLGTLAVLPGNIVSALL

SEQ ID NO: 16315 - protein, 20 aa, Bos taurus
LASTGVGVVKVISTIPATLL

SEQ ID NO: 16316 - protein, 20 aa, Bos taurus
LIQVIFGAVDLPAKLVSFLV

SEQ ID NO: 16317 - protein, 23 aa, Bos taurus
ANQLLGMTAIPCACLGIFLGGLL

SEQ ID NO: 16318 - protein, 20 aa, Bos taurus
TYYSLTASTLSTFALSALVG

SEQ ID NO: 16319 - protein, 19 aa, Bos taurus
FPASPFWSVMFFLMLVNLG

SEQ ID NO: 16320 - protein, 20 aa, Bos taurus
VHLLFHFLQVLTACFGSFAH

SEQ ID NO: 16321 - protein, 20 aa, Bos taurus
LMPVAPLWAALFFFMLLLLG

SEQ ID NO: 16322 - protein, 22 aa, Bos taurus
LVMKLVPVGLRGLMMAVMIAAL

SEQ ID NO: 16323 - protein, 20 aa, Bos taurus
SIFGVLQLLCLLTAPVIGYI

SEQ ID NO: 16324 - protein, 20 aa, Bos taurus
LNLFLMGVVEIPAYVLVCLG

SEQ ID NO: 16325 - protein, 20 aa, Bos taurus
LGWDPLPAAFLLSVAAISDL

SEQ ID NO: 16326 - protein, 20 aa, Bos taurus
MDLLWTTLSEFPGVLVTLWI

SEQ ID NO: 16327 - protein, 20 aa, Bos taurus
AINSVVYVISAPMSPIFGLL

SEQ ID NO: 16328 - protein, 20 aa, Bos taurus
IISVLGYVAVHMAGVQTGLY

SEQ ID NO: 16329 - protein, 19 aa, Bos taurus
VILGCLFGPPALYIWAVGL

SEQ ID NO: 16330 - protein, 20 aa, Bos taurus
VFLFQVLFGAVNLPANCVAF

SEQ ID NO: 16331 - protein, 20 aa, Bos taurus
INTYCSLAACVLTSVALSSA

SEQ ID NO: 16332 - protein, 22 aa, Bos taurus
FLAYFGSFATVGLLWFAHHSLF

SEQ ID NO: 16333 - protein, 20 aa, Bos taurus
AFLLSILAFVDMVARPSMGL

SEQ ID NO: 16334 - protein, 20 aa, Bos taurus
TLFDVGGIIGGILAGLVSDY

SEQ ID NO: 16335 - protein, 20 aa, Bos taurus
IVNTYFSLAASVVTAYACSS

SEQ ID NO: 16336 - protein, 20 aa, Bos taurus
LSVVFTGMIELTFFILSAFK

SEQ ID NO: 16337 - protein, 20 aa, Bos taurus
VIGFGSIKIAAFIAMVGILS

SEQ ID NO: 16338 - protein, 20 aa, Bos taurus
LSGLGLNVYLTQLVFGAVEL

SEQ ID NO: 16339 - protein, 20 aa, Bos taurus
LIFGLITCLTGVLGVGLGVE

SEQ ID NO: 16340 - protein, 20 aa, Bos taurus
GAPLGIIFSSFMAASLLGSS

SEQ ID NO: 16341 - protein, 20 aa, Bos taurus
IWYDVGGIIGGTLQGFISDM

SEQ ID NO: 16342 - protein, 20 aa, Bos taurus
VAICVIFAMSFVPASFVLYL

SEQ ID NO: 16343 - protein, 20 aa, Bos taurus
FMAYPFIMLSLWGMIMTSSI

SEQ ID NO: 16344 - protein, 19 aa, Bos taurus
MAAFGVFGLCQIHAFVDYL

SEQ ID NO: 16345 - protein, 20 aa, Bos taurus
LALYFNLLGLWIILLCAVFS

SEQ ID NO: 16346 - protein, 19 aa, Bos taurus
LLAQMSGAMALGGTIGLTI

SEQ ID NO: 16347 - protein, 20 aa, Bos taurus
SLMAAYLKVLPLFIMVFPGM

SEQ ID NO: 16348 - protein, 20 aa, Bos taurus
SILASYLKMLPMGLMVMPGM

SEQ ID NO: 16349 - protein, 20 aa, Bos taurus
TPVSALLHSSTMVVAGIFLL

SEQ ID NO: 16350 - protein, 20 aa, Bos taurus
FVVAIGSVAGLTVSLLGSLF

SEQ ID NO: 16351 - protein, 20 aa, Bos taurus
SSIFFHLMTCVLGLGVVLPW

SEQ ID NO: 16352 - protein, 20 aa, Bos taurus
VYFVSLLWAIVGVQIWSNLW

SEQ ID NO: 16353 - protein, 20 aa, Bos taurus
INMIWSAPLQVILALYLLWL

SEQ ID NO: 16354 - protein, 7 aa, Bos taurus
INLGCDV

SEQ ID NO: 16355 - protein, 7 aa, Bos taurus
INLGCDV

SEQ ID NO: 16356 - protein, 7 aa, Bos taurus
FSLGSNV

SEQ ID NO: 16357 - protein, 18 aa, Bos taurus
KILIFGLLEETALAAFLS

SEQ ID NO: 16358 - protein, 20 aa, Bos taurus
LAVWGSMLIWLVFFGIYSTI

SEQ ID NO: 16359 - protein, 20 aa, Bos taurus
LIFCSVVLGTFISQIIIVEF

SEQ ID NO: 16360 - protein, 20 aa, Bos taurus
LAFSVTLFTIFAFINVGVLL

SEQ ID NO: 16361 - protein, 18 aa, Bos taurus
KMFCYAVLGSIMGQLLVI

SEQ ID NO: 16362 - protein, 18 aa, Bos taurus
KILIFGLFEETALAAFLS

SEQ ID NO: 16363 - protein, 18 aa, Bos taurus
IWLVGSIGLSMSLHFLIL

SEQ ID NO: 16364 - protein, 20 aa, Bos taurus
FSHIAIWGSIALWVVFFGIY

SEQ ID NO: 16365 - protein, 20 aa, Bos taurus
LAQQTIHWLFMGYSMTAFCL

SEQ ID NO: 16366 - protein, 20 aa, Bos taurus
WLMVVAQLLSLGCYVASLAF

SEQ ID NO: 16367 - protein, 20 aa, Bos taurus
LLFFGKLLVVGGVGVLSFFF

SEQ ID NO: 16368 - protein, 11 aa, Bos taurus
ALDGQWILNSF

SEQ ID NO: 16369 - protein, 23 aa, Bos taurus
GVFIPSLLIGAAWGRLFGISLSY

SEQ ID NO: 16370 - protein, 21 aa, Bos taurus
SKTMLLFFMPQVFNFLYSLPQ

SEQ ID NO: 16371 - protein, 20 aa, Bos taurus
FLFLLGKLLIVGSVGILAFF

SEQ ID NO: 16372 - protein, 20 aa, Bos taurus
FHVLMAQVTTVVITTVSVLV

SEQ ID NO: 16373 - protein, 22 aa, Bos taurus
CPTLNWLLLPLFVIVMVVNVGV

SEQ ID NO: 16374 - protein, 20 aa, Bos taurus
AAFGGLCIGALSVLADFLGA

SEQ ID NO: 16375 - protein, 20 aa, Bos taurus
ISRGFGLIAGIISSTATGFL

SEQ ID NO: 16376 - protein, 20 aa, Bos taurus
FFHFMLFLASLYIMMTLTNW

SEQ ID NO: 16377 - protein, 20 aa, Bos taurus
AAFGGLCIGALSVLADFLGA

SEQ ID NO: 16378 - protein, 20 aa, Bos taurus
TYNMFGHFKFCITLFGGYVL

SEQ ID NO: 16379 - protein, 20 aa, Bos taurus
FLTSSLIGTLALSLTIPLSI

SEQ ID NO: 16380 - protein, 20 aa, Bos taurus
VVSFPIITAGPGFIATMWGV

SEQ ID NO: 16381 - protein, 20 aa, Bos taurus
PAVWGVVLNQAFGGLLVAVV

SEQ ID NO: 16382 - protein, 20 aa, Bos taurus
IMTVLILATLLSMGGLPPLS

SEQ ID NO: 16383 - protein, 20 aa, Bos taurus
IFDITVGLPLPWMLFSLING

SEQ ID NO: 16384 - protein, 20 aa, Bos taurus
SVITVSILVFTNLLVIFVPN

SEQ ID NO: 16385 - protein, 20 aa, Bos taurus
FASLVGAGIMLLLMMKMARF

SEQ ID NO: 16386 - protein, 20 aa, Bos taurus
VAIALILLVLVNVLVICVPT

SEQ ID NO: 16387 - protein, 20 aa, Bos taurus
ALPGLALLRTCFVPLFVFCN

SEQ ID NO: 16388 - protein, 20 aa, Bos taurus
VTLPTMWLGAASLAWELLTA

SEQ ID NO: 16389 - protein, 20 aa, Bos taurus
VLQTLVWFLLTLLLALFIPD

SEQ ID NO: 16390 - protein, 22 aa, Bos taurus
LPIKIILMLLFTIYSISSLKTL

SEQ ID NO: 16391 - protein, 20 aa, Bos taurus
SFLYGCNAAFLTLAFPSEHF

SEQ ID NO: 16392 - protein, 20 aa, Bos taurus
FSVLGLFSSQAAGILSTLLA

SEQ ID NO: 16393 - protein, 20 aa, Bos taurus
VCTPAGGLMTGALVLLSLDY

SEQ ID NO: 16394 - protein, 20 aa, Bos taurus
FLGVLAVLGTSFGAYNMAMA

SEQ ID NO: 16395 - protein, 20 aa, Bos taurus
TVLFALGAVTQLACIIALLL

SEQ ID NO: 16396 - protein, 20 aa, Bos taurus
TLMMFLVRLPFLFTVMPLSV

SEQ ID NO: 16397 - protein, 20 aa, Bos taurus
AILLLIPASLFVGWGHTLPI

SEQ ID NO: 16398 - protein, 22 aa, Bos taurus
YAVVRGLFLLKLGLSLLMLLAG

SEQ ID NO: 16399 - protein, 20 aa, Bos taurus
WDAPSIVGLVVFILCTVFIS

SEQ ID NO: 16400 - protein, 20 aa, Bos taurus
VCHIIVTVVIITVATLVSLL

SEQ ID NO: 16401 - protein, 20 aa, Bos taurus
LMNCGGFGMEATLLLVVGYS

SEQ ID NO: 16402 - protein, 20 aa, Bos taurus
IMNCGGFGMEATLLLVVGYS

SEQ ID NO: 16403 - protein, 20 aa, Bos taurus
IAVGMFFVMCSAFAAGILES

SEQ ID NO: 16404 - protein, 21 aa, Bos taurus
PAMMWALGFIFLFTVGGLTGI

SEQ ID NO: 16405 - protein, 20 aa, Bos taurus
VLCIFIVVLIYSVAQGCVVG

SEQ ID NO: 16406 - protein, 20 aa, Bos taurus
TLHLIGLAGMAGCAVLMTIA

SEQ ID NO: 16407 - protein, 18 aa, Bos taurus
LFTLLVVLATFLLSLFCV

SEQ ID NO: 16408 - protein, 20 aa, Bos taurus
IFDFVQLLLIVIGAVVVVSV

SEQ ID NO: 16409 - protein, 20 aa, Bos taurus
LFLIGMSGMFVCAIFMSVGL

SEQ ID NO: 16410 - protein, 20 aa, Bos taurus
FLLLLGFSVCFTACCVLTGA

SEQ ID NO: 16411 - protein, 20 aa, Bos taurus
LLLTLSGVVMVFSTSAFGTY

SEQ ID NO: 16412 - protein, 19 aa, Bos taurus
TWVAEIGLVFNILGMMVFA

SEQ ID NO: 16413 - protein, 20 aa, Bos taurus
LLGLAGMCGCAILMTVALLL

SEQ ID NO: 16414 - protein, 19 aa, Bos taurus
YMAYLSAELFHLSGIMALI

SEQ ID NO: 16415 - protein, 19 aa, Bos taurus
VSLAILTIGSLLVIAVVNL

SEQ ID NO: 16416 - protein, 20 aa, Bos taurus
LLMVAVMLGVCSIMGLPWFV

SEQ ID NO: 16417 - protein, 16 aa, Bos taurus
HLDLFWVAILMVVCSF

SEQ ID NO: 16418 - protein, 18 aa, Bos taurus
IFIASICCVTYLLGLTMV

SEQ ID NO: 16419 - protein, 19 aa, Bos taurus
WFVLGVVITCFFGSLVTLT

SEQ ID NO: 16420 - protein, 20 aa, Bos taurus
VLILGVSVTSFLVGLVMLTE

SEQ ID NO: 16421 - protein, 19 aa, Bos taurus
YPLATSNLAAGLACFLMIF

SEQ ID NO: 16422 - protein, 20 aa, Bos taurus
LFTFAVSFGTFLLALFCITK

SEQ ID NO: 16423 - protein, 20 aa, Bos taurus
RTLHLIGLGGMAFCSILMTI

SEQ ID NO: 16424 - protein, 20 aa, Bos taurus
WLCALLGMIIVGMSILCIPL

SEQ ID NO: 16425 - protein, 18 aa, Bos taurus
YVTLGVAVAGFLLGIPLT

SEQ ID NO: 16426 - protein, 20 aa, Bos taurus
MLAGSSVMSCVSCFFLSFGN

SEQ ID NO: 16427 - protein, 20 aa, Bos taurus
FLCIGSSVMAASLVTMGIVN

SEQ ID NO: 16428 - protein, 20 aa, Bos taurus
PAQMASLLLAGICILINGVV

SEQ ID NO: 16429 - protein, 23 aa, Bos taurus
LSALGAIRMAMLVNLVSTACYVS

SEQ ID NO: 16430 - protein, 20 aa, Bos taurus
LDMVHVQNAALAGGVVVGTS

SEQ ID NO: 16431 - protein, 18 aa, Bos taurus
ILTVICCLLAFCIGLIFV

SEQ ID NO: 16432 - protein, 20 aa, Bos taurus
ATPVWLLFYGGVGICTGLWV

SEQ ID NO: 16433 - protein, 20 aa, Bos taurus
ISVALCCTICFVIDLSMVTD

SEQ ID NO: 16434 - protein, 23 aa, Bos taurus
LMIVGRIFVAFMVVISIAWVPII

SEQ ID NO: 16435 - protein, 20 aa, Bos taurus
LVGFGVTCLIPNLPLQILSF

SEQ ID NO: 16436 - protein, 20 aa, Bos taurus
NILIFSLLSSAVTSGVIMVI

SEQ ID NO: 16437 - protein, 20 aa, Bos taurus
LLMLWTTLTGVILALYPVAE

SEQ ID NO: 16438 - protein, 20 aa, Bos taurus
TMALCFVVFSFCSLLLFICV

SEQ ID NO: 16439 - protein, 20 aa, Bos taurus
IIWVLCAVVTTLASHIMLAF

SEQ ID NO: 16440 - protein, 20 aa, Bos taurus
VACCILLTAIGLFISLYIVQ

SEQ ID NO: 16441 - protein, 17 aa, Bos taurus
VLLTRSCAILPTVLLAV

SEQ ID NO: 16442 - protein, 20 aa, Bos taurus
VSQTLFLFLLGISILAITFV

SEQ ID NO: 16443 - protein, 17 aa, Bos taurus
ATLAGGVGLGTVAELMV

SEQ ID NO: 16444 - protein, 21 aa, Bos taurus
QPMGLLNTLSLAFVGGLPLAY

SEQ ID NO: 16445 - protein, 20 aa, Bos taurus
VQYFFAASIIANGLCHLAAP

SEQ ID NO: 16446 - protein, 20 aa, Bos taurus
ATTCCVMLILAAPMMFLYNH

SEQ ID NO: 16447 - protein, 17 aa, Bos taurus
MVHIQNATLAGGVAVGT

SEQ ID NO: 16448 - protein, 20 aa, Bos taurus
FVIPGFSIFGIFWMICHIIF

SEQ ID NO: 16449 - protein, 20 aa, Bos taurus
NTVLLGLGFQMFQLAWYGFG

SEQ ID NO: 16450 - protein, 20 aa, Bos taurus
LTMAGTLLGAALAVGLRILV

SEQ ID NO: 16451 - protein, 20 aa, Bos taurus
LVCAAGLLGSAPFLFLALAC

SEQ ID NO: 16452 - protein, 20 aa, Bos taurus
PMHLLSLAVLIVVFSLFMLT

SEQ ID NO: 16453 - protein, 20 aa, Bos taurus
APVLALSLLLAIGSLVGYSR

SEQ ID NO: 16454 - protein, 20 aa, Bos taurus
FLWDIMNYTVSAALVVGIFI

SEQ ID NO: 16455 - protein, 19 aa, Bos taurus
SLIAYSSVSHMALVIVAIL

SEQ ID NO: 16456 - protein, 20 aa, Bos taurus
SVISLVGFVLLTIGALLMLT

SEQ ID NO: 16457 - protein, 22 aa, Bos taurus
GLFVACAFSGTLSTVAASINAL

SEQ ID NO: 16458 - protein, 20 aa, Bos taurus
LVAAFHSLVGLAAVLTCIAE

SEQ ID NO: 16459 - protein, 22 aa, Bos taurus
GLMMAVMVAALTSSLTSIFNSA

SEQ ID NO: 16460 - protein, 20 aa, Bos taurus
GLMVAVMMAALMSSLTSIFN

SEQ ID NO: 16461 - protein, 20 aa, Bos taurus
IQSITLCLGAITTLFTAMCA

SEQ ID NO: 16462 - protein, 20 aa, Bos taurus
VIYAMAGDGLLFRFLAHVSS

SEQ ID NO: 16463 - protein, 20 aa, Bos taurus
VYLLAYWCLLATVACLVVLY

SEQ ID NO: 16464 - protein, 20 aa, Bos taurus
LLPVPIAVWVLKKLVIHFGV

SEQ ID NO: 16465 - protein, 20 aa, Bos taurus
SVLAGVAVMVLMVPLNAVMA

SEQ ID NO: 16466 - protein, 8 aa, Bos taurus
SIRGALVL

SEQ ID NO: 16467 - protein, 8 aa, Bos taurus
AIHGSAVF

SEQ ID NO: 16468 - protein, 8 aa, Bos taurus
TIYGWAVL

SEQ ID NO: 16469 - protein, 20 aa, Bos taurus
NSIILPTFMAITALLNLYFY

SEQ ID NO: 16470 - protein, 20 aa, Bos taurus
LFCAIVLLFLMLLFVISSIA

SEQ ID NO: 16471 - protein, 20 aa, Bos taurus
IFGFIGASAAAMLIFILPSA

SEQ ID NO: 16472 - protein, 20 aa, Bos taurus
AIVAGIILSNVLPYLEAVYT

SEQ ID NO: 16473 - protein, 20 aa, Bos taurus
IFGVIGSTSAPSLIFILPSI

SEQ ID NO: 16474 - protein, 20 aa, Bos taurus
VLFTSLLGLSNGYLSTLALI

SEQ ID NO: 16475 - protein, 20 aa, Bos taurus
AAVQLSVFGTATVALFLISL

SEQ ID NO: 16476 - protein, 20 aa, Bos taurus
ISVIGGLAACFIFVFPGLCL

SEQ ID NO: 16477 - protein, 20 aa, Bos taurus
TFYLLGLGPLEVFCEFVFPF

SEQ ID NO: 16478 - protein, 20 aa, Bos taurus
GLVMALSAVVSLLQFPLFTL

SEQ ID NO: 16479 - protein, 20 aa, Bos taurus
GLGLIMALGALGGLSGPAQR

SEQ ID NO: 16480 - protein, 20 aa, Bos taurus
FYYIPKSALAAVIIMAVVPL

SEQ ID NO: 16481 - protein, 20 aa, Bos taurus
VLIVVSWVLFTGCLSYVKVM

SEQ ID NO: 16482 - protein, 20 aa, Bos taurus
PSQLPVFFVFPSLWGMADAV

SEQ ID NO: 16483 - protein, 20 aa, Bos taurus
TMFACLAFLETLGGITAVST

SEQ ID NO: 16484 - protein, 20 aa, Bos taurus
LGLLLYSWAAAVVVPCLSSV

SEQ ID NO: 16485 - protein, 20 aa, Bos taurus
ALLFGMVALVTKPGQTFAPL

SEQ ID NO: 16486 - protein, 20 aa, Bos taurus
FFHLCLVLASVHIMMTLTNW

SEQ ID NO: 16487 - protein, 20 aa, Bos taurus
CLGIVLELNGVLCAAPLIFI

SEQ ID NO: 16488 - protein, 20 aa, Bos taurus
GVAISFLVLAVGFSGFAISG

SEQ ID NO: 16489 - protein, 20 aa, Bos taurus
GVAISFLVLAVGFSGFAISG

SEQ ID NO: 16490 - protein, 20 aa, Bos taurus
VLIGVSEIFASIAGLEFAYS

SEQ ID NO: 16491 - protein, 29 aa, Bos taurus
YYVVAHFHYVLSMGAVFAIMGGFVHWFPL

SEQ ID NO: 16492 - protein, 20 aa, Bos taurus
ESAPHALLCGLVGTLPLAIF

SEQ ID NO: 16493 - protein, 22 aa, Bos taurus
YLSIVAIFGFVAFFEVGPGPIP

SEQ ID NO: 16494 - protein, 20 aa, Bos taurus
GTSILFGVLMEVIGVAWFYG

SEQ ID NO: 16495 - protein, 20 aa, Bos taurus
YIFLATVPVIAAFILLRAYF

SEQ ID NO: 16496 - protein, 20 aa, Bos taurus
AIFLFVSFFEIGPGPIPWFM

SEQ ID NO: 16497 - protein, 22 aa, Bos taurus
MPYVSIACVISYVIGHALGPSP

SEQ ID NO: 16498 - protein, 20 aa, Bos taurus
VGLAWLAVGSMCLFIAGFAV

SEQ ID NO: 16499 - protein, 20 aa, Bos taurus
PLMFTGYGLLFLSLVVTPII

SEQ ID NO: 16500 - protein, 20 aa, Bos taurus
IVAIFGFVAFFEIGPGPIPW

SEQ ID NO: 16501 - protein, 19 aa, Bos taurus
WTFVISTLLFCLIARVLGV

SEQ ID NO: 16502 - protein, 19 aa, Bos taurus
LLPYYTCSCILAFIACSVF

SEQ ID NO: 16503 - protein, 20 aa, Bos taurus
GLMIFILMGSSVFMTSILKF

SEQ ID NO: 16504 - protein, 17 aa, Bos taurus
LPWYVAATVISIAHIDS

SEQ ID NO: 16505 - protein, 20 aa, Bos taurus
GVCLLWVAFFECFAIAWIYG

SEQ ID NO: 16506 - protein, 21 aa, Bos taurus
FATGPAVLTVALIEAVAVFWF

SEQ ID NO: 16507 - protein, 20 aa, Bos taurus
GMCLLFVAIFESFCVAWAYG

SEQ ID NO: 16508 - protein, 22 aa, Bos taurus
WLNIMVACVGRMGITIVFQMVC

SEQ ID NO: 16509 - protein, 26 aa, Bos taurus
IYVLTLLDTFAAGTSILFAVLMEAIG

SEQ ID NO: 16510 - protein, 25 aa, Bos taurus
FICIGAILVFVAFFEIGPGPIPWFI

SEQ ID NO: 16511 - protein, 20 aa, Bos taurus
GVGFAIGMVDSSMMPIMGYL

SEQ ID NO: 16512 - protein, 20 aa, Bos taurus
SFSLVIISCIMCVSIMYIYG

SEQ ID NO: 16513 - protein, 20 aa, Bos taurus
IALLCLFGGVSIASWNALDV

SEQ ID NO: 16514 - protein, 20 aa, Bos taurus
SLLVYVAAFSIGLGPMPWLV

SEQ ID NO: 16515 - protein, 20 aa, Bos taurus
LAVLGKGCLASSFNCIFLYT

SEQ ID NO: 16516 - protein, 22 aa, Bos taurus
LCVMCVCSMIGAMAQTPSVIIL

SEQ ID NO: 16517 - protein, 20 aa, Bos taurus
MMLTPFGALAAGFLAGAIST

SEQ ID NO: 16518 - protein, 20 aa, Bos taurus
TLPLLIVVILENIAVSFVYG

SEQ ID NO: 16519 - protein, 14 aa, Bos taurus
FTIELASAFTVVIA

SEQ ID NO: 16520 - protein, 20 aa, Bos taurus
GTTLLWQAFWECVVVAWVYG

SEQ ID NO: 16521 - protein, 18 aa, Bos taurus
VADYLTPPVAALFLLAIF

SEQ ID NO: 16522 - protein, 20 aa, Bos taurus
GFIHSAVGGLYAAVYPSTQF

SEQ ID NO: 16523 - protein, 20 aa, Bos taurus
VWLVVASMAGKFFIGAAFGL

SEQ ID NO: 16524 - protein, 20 aa, Bos taurus
GLVALTMAYGFTSGALTPVA

SEQ ID NO: 16525 - protein, 20 aa, Bos taurus
LTLLLFIARAFISGGFQAAY

SEQ ID NO: 16526 - protein, 20 aa, Bos taurus
LLGLSYSLLACALWPMVAFV

SEQ ID NO: 16527 - protein, 20 aa, Bos taurus
LAFCIWIVASCLILLSSLLL

SEQ ID NO: 16528 - protein, 20 aa, Bos taurus
LLNVLQSLLLPFAVLPILTF

SEQ ID NO: 16529 - protein, 20 aa, Bos taurus
AVSALGIAVSSVTLMCSFAH

SEQ ID NO: 16530 - protein, 22 aa, Bos taurus
SLIIGFVCGIVSTLGFVYLTPF

SEQ ID NO: 16531 - protein, 20 aa, Bos taurus
VRISCAIIFLASIFQFAIWT

SEQ ID NO: 16532 - protein, 20 aa, Bos taurus
IELCIYAGFFGFAFGWLSSV

SEQ ID NO: 16533 - protein, 20 aa, Bos taurus
IGISIVMLLICGALVNGPYA

SEQ ID NO: 16534 - protein, 20 aa, Bos taurus
IPPYYAMIIGSIAGAVSVFG

SEQ ID NO: 16535 - protein, 20 aa, Bos taurus
FCLISEQLVFFSLLATAILG

SEQ ID NO: 16536 - protein, 20 aa, Bos taurus
AWMMWAAGIVAAVSSITFPA

SEQ ID NO: 16537 - protein, 20 aa, Bos taurus
TALAVMGKAFSEAAFTTAYL

SEQ ID NO: 16538 - protein, 20 aa, Bos taurus
IVATYIFIFIGETLLSMNWA

SEQ ID NO: 16539 - protein, 20 aa, Bos taurus
FIAFLLIELACGLYFPSMSF

SEQ ID NO: 16540 - protein, 20 aa, Bos taurus
LLMAVTGFFIGGPSNMISSA

SEQ ID NO: 16541 - protein, 20 aa, Bos taurus
LPALVALLMLYGWAVIPMMY

SEQ ID NO: 16542 - protein, 22 aa, Bos taurus
SYMGATALMIAHGLTSSMLFCL

SEQ ID NO: 16543 - protein, 22 aa, Bos taurus
WSSYYFDLQLLVFMFPVGLYYC

SEQ ID NO: 16544 - protein, 20 aa, Bos taurus
LLFGVICTSTAVAASLMGGV

SEQ ID NO: 16545 - protein, 20 aa, Bos taurus
IVAYLGTYIGGVTFSGSLVA

SEQ ID NO: 16546 - protein, 20 aa, Bos taurus
IVGRVFVLLLVLVSILWIPV

SEQ ID NO: 16547 - protein, 20 aa, Bos taurus
LLVGRLVIVVLVGVSVAWIP

SEQ ID NO: 16548 - protein, 20 aa, Bos taurus
LGLMMVTIGINQPYLAFLHI

SEQ ID NO: 16549 - protein, 20 aa, Bos taurus
PVVACIVSGFLAALLSLLVS

SEQ ID NO: 16550 - protein, 16 aa, Bos taurus
KYFHFIVVATYIPGII

SEQ ID NO: 16551 - protein, 20 aa, Bos taurus
IISIFIIFLLVIGTLLLALL

SEQ ID NO: 16552 - protein, 20 aa, Bos taurus
VGTFTWVCTPFLVALSTFAV

SEQ ID NO: 16553 - protein, 8 aa, Bos taurus
LAGYQMNF

SEQ ID NO: 16554 - protein, 8 aa, Bos taurus
LAGYQMTF

SEQ ID NO: 16555 - protein, 8 aa, Bos taurus
LAGYQMSF

SEQ ID NO: 16556 - protein, 20 aa, Bos taurus
ILMGISNGVGTLSGMVCPII

SEQ ID NO: 16557 - protein, 20 aa, Bos taurus
ILMGISNGVGTLSGMVCPII

SEQ ID NO: 16558 - protein, 20 aa, Bos taurus
GLFFFFSGVGSFVGSGLLAL

SEQ ID NO: 16559 - protein, 26 aa, Bos taurus
DTWAKIHFAIMFVGVNMTFFPQHFLG

SEQ ID NO: 16560 - protein, 20 aa, Bos taurus
MILLAVLTTSYILVLELSGY

SEQ ID NO: 16561 - protein, 20 aa, Bos taurus
AAIAVAGFSNWTSNFIVGMC

SEQ ID NO: 16562 - protein, 19 aa, Bos taurus
LCWKFVSPCFLLFVVVVSI

SEQ ID NO: 16563 - protein, 20 aa, Bos taurus
LRWFQMRIEMIFVIFFIAVT

SEQ ID NO: 16564 - protein, 20 aa, Bos taurus
AALAIAAFSNWTGNFIIALC

SEQ ID NO: 16565 - protein, 20 aa, Bos taurus
MVAGTVHWLSNFTVGLVFPF

SEQ ID NO: 16566 - protein, 20 aa, Bos taurus
VKGVATGVCVLTNWFMAFLV

SEQ ID NO: 16567 - protein, 25 aa, Bos taurus
GALFSALACVNGLAMLMASGIFNSL

SEQ ID NO: 16568 - protein, 20 aa, Bos taurus
AAMAVAGFSNWTCNFIIGMG

SEQ ID NO: 16569 - protein, 21 aa, Bos taurus
QFIIAYGGLRGAIAFSLGYLL

SEQ ID NO: 16570 - protein, 27 aa, Bos taurus
VLLTVALVAYLVLFNVYPSWQWDCCGH

SEQ ID NO: 16571 - protein, 20 aa, Bos taurus
PVLYGVFLYMGASSLKGIQF

SEQ ID NO: 16572 - protein, 16 aa, Bos taurus
VTGTLVFILTGLSVFM

SEQ ID NO: 16573 - protein, 19 aa, Bos taurus
YCWAVVTPLLCTGCFIFSL

SEQ ID NO: 16574 - protein, 19 aa, Bos taurus
ICWVAISPLFLLFIICSFL

SEQ ID NO: 16575 - protein, 20 aa, Bos taurus
PLIKYCWLFLTPAVCTATFL

SEQ ID NO: 16576 - protein, 20 aa, Bos taurus
GMMVCSSLCDLGGVLTPFLV

SEQ ID NO: 16577 - protein, 22 aa, Bos taurus
FVSPAFLLFVVIVSIINFKPLT

SEQ ID NO: 16578 - protein, 20 aa, Bos taurus
AAMAVAGCSNWTSNFLVGLL

SEQ ID NO: 16579 - protein, 20 aa, Bos taurus
VSVYGSVYAIADVAFCMGYA

SEQ ID NO: 16580 - protein, 19 aa, Bos taurus
ICWRFVSPAIIFFILIFSV

SEQ ID NO: 16581 - protein, 22 aa, Bos taurus
FGFLNALCKLAAVLGISIFTSF

SEQ ID NO: 16582 - protein, 20 aa, Bos taurus
AMALTSSMNWGINLLISLTF

SEQ ID NO: 16583 - protein, 20 aa, Bos taurus
GLGMGSTLARVGSIVSPLVS

SEQ ID NO: 16584 - protein, 25 aa, Bos taurus
YALGVLFLLLRLLGFIPPPLIFGAG

SEQ ID NO: 16585 - protein, 20 aa, Bos taurus
LHGMPGVLGALLGGLVAGLA

SEQ ID NO: 16586 - protein, 21 aa, Bos taurus
YMWKYISPLMLLSLLIASIVN

SEQ ID NO: 16587 - protein, 15 aa, Bos taurus
TTHCKVGSVVAVGWI

SEQ ID NO: 16588 - protein, 20 aa, Bos taurus
WCWSFFTPLVCMGIFIFNVV

SEQ ID NO: 16589 - protein, 21 aa, Bos taurus
YMYVATALFWITGLITVIVSL

SEQ ID NO: 16590 - protein, 20 aa, Bos taurus
LISALFALLQQPLFLAMMGP

SEQ ID NO: 16591 - protein, 20 aa, Bos taurus
LAVGSGSTVGRVGSIVAPLC

SEQ ID NO: 16592 - protein, 20 aa, Bos taurus
IYCGLGLVQMVESIGGLLGA

SEQ ID NO: 16593 - protein, 20 aa, Bos taurus
ALGLGTCSGMARVGALITPF

SEQ ID NO: 16594 - protein, 20 aa, Bos taurus
FMQSIQNLGLAVISIIAGMI

SEQ ID NO: 16595 - protein, 20 aa, Bos taurus
LLFFLLSNVTTGLVNLSIDT

SEQ ID NO: 16596 - protein, 21 aa, Bos taurus
VITSSIMVLVCAVNLYFVISY

SEQ ID NO: 16597 - protein, 20 aa, Bos taurus
SGFLGIASNIGAALAPLLMI

SEQ ID NO: 16598 - protein, 20 aa, Bos taurus
IPGIIGGIAGAVTASIANID

SEQ ID NO: 16599 - protein, 23 aa, Bos taurus
AFMFAKLALYPCASLLAFACTCV

SEQ ID NO: 16600 - protein, 20 aa, Bos taurus
AVGLVTIVECCPVLLGPPVL

SEQ ID NO: 16601 - protein, 20 aa, Bos taurus
AIIDGTGSIGAALGPLLAGL

SEQ ID NO: 16602 - protein, 20 aa, Bos taurus
VHNLHGLPGVIGGLAGIITV

SEQ ID NO: 16603 - protein, 20 aa, Bos taurus
GIFLSMFLIVLPLESMAHGL

SEQ ID NO: 16604 - protein, 20 aa, Bos taurus
LCNGLGPALYGFIFYMFHVE

SEQ ID NO: 16605 - protein, 20 aa, Bos taurus
MGLTALVGRLGGSLAPLAAL

SEQ ID NO: 16606 - protein, 20 aa, Bos taurus
FQIVLSHLLGDAGSPYLIGS

SEQ ID NO: 16607 - protein, 20 aa, Bos taurus
GVLNWFRVPLHLLACLGLLV

SEQ ID NO: 16608 - protein, 20 aa, Bos taurus
GIVDGTGSIGAAVGQYLVSL

SEQ ID NO: 16609 - protein, 20 aa, Bos taurus
VALSCANLFIGINSSAITFV

SEQ ID NO: 16610 - protein, 20 aa, Bos taurus
LLPLMATWWLLASLTNLALP

SEQ ID NO: 16611 - protein, 16 aa, Bos taurus
RIFIIMYGVTSMYFSA

SEQ ID NO: 16612 - protein, 20 aa, Bos taurus
IHGMCGGPMLGLFSLGILFP

SEQ ID NO: 16613 - protein, 19 aa, Bos taurus
HLLNAGLLAGSVGGIIPFM

SEQ ID NO: 16614 - protein, 20 aa, Bos taurus
LFIYIQSISSYLQPPVAVVF

SEQ ID NO: 16615 - protein, 20 aa, Bos taurus
QSVTSSLAPPVTAVFVLGIF

SEQ ID NO: 16616 - protein, 20 aa, Bos taurus
MPFTTTALIVGSLALTGMPF

SEQ ID NO: 16617 - protein, 20 aa, Bos taurus
LIEMMSIGTLLAYTLVSVCV

SEQ ID NO: 16618 - protein, 20 aa, Bos taurus
YVAATVCLAVFIFLEYVRYF

SEQ ID NO: 16619 - protein, 20 aa, Bos taurus
VMSRNVSLLFSTITTLLTIL

SEQ ID NO: 16620 - protein, 20 aa, Bos taurus
ILRFPLNILPMVISSIVQAS

SEQ ID NO: 16621 - protein, 12 aa, Bos taurus
RVTQSNFAVGYK

SEQ ID NO: 16622 - protein, 12 aa, Bos taurus
KLTRNNFAVGYR

SEQ ID NO: 16623 - protein, 12 aa, Bos taurus
KLSQNNFALGYK

SEQ ID NO: 16624 - protein, 20 aa, Bos taurus
LLIIFPHFCLGRGLIDLALS

SEQ ID NO: 16625 - protein, 20 aa, Bos taurus
IILMGVNMVITALYSLYMLI

SEQ ID NO: 16626 - protein, 21 aa, Bos taurus
MLVLAPVMCILSGIGVSQVLS

SEQ ID NO: 16627 - protein, 20 aa, Bos taurus
ALAGLLTGILLSFWVAIGAF

SEQ ID NO: 16628 - protein, 18 aa, Bos taurus
FTTGITCLGSVSALSAVM

SEQ ID NO: 16629 - protein, 20 aa, Bos taurus
AFFGLVLGLLLGLVRLILDF

SEQ ID NO: 16630 - protein, 20 aa, Bos taurus
AFWGLMAGLAVGATRLVLEF

SEQ ID NO: 16631 - protein, 20 aa, Bos taurus
LIATSFTAIYSTRIIFFALL

SEQ ID NO: 16632 - protein, 20 aa, Bos taurus
VTICVLLLFILMFVFCSFII

SEQ ID NO: 16633 - protein, 20 aa, Bos taurus
GPLILTHIYLLLGMSLPIWL

SEQ ID NO: 16634 - protein, 20 aa, Bos taurus
TALLNFVLSLIIFLTTLFYL

SEQ ID NO: 16635 - protein, 20 aa, Bos taurus
KAIGLFISFLSIFLFLCNHV

SEQ ID NO: 16636 - protein, 7 aa, Bos taurus
FQLHTNV

SEQ ID NO: 16637 - protein, 7 aa, Bos taurus
FQLHTNV

SEQ ID NO: 16638 - protein, 7 aa, Bos taurus
FQLHTHV

SEQ ID NO: 16639 - protein, 20 aa, Bos taurus
VVITVLNSYSGWALCAEGFL

SEQ ID NO: 16640 - protein, 20 aa, Bos taurus
LYFSMILSSVTLITVCAVSW

SEQ ID NO: 16641 - protein, 20 aa, Bos taurus
LHFAVALFLLSGAVVVAGSL

SEQ ID NO: 16642 - protein, 20 aa, Bos taurus
LLIGSLFAGYIISNNIPPTT

SEQ ID NO: 16643 - protein, 20 aa, Bos taurus
WAILLVVLMVLLISALVFVI

SEQ ID NO: 16644 - protein, 20 aa, Bos taurus
ALVPYAGVLAVGVGDTVASI

SEQ ID NO: 16645 - protein, 20 aa, Bos taurus
IFGINIVFIPSALAAILGAV

SEQ ID NO: 16646 - protein, 20 aa, Bos taurus
QGITVFGYSMAVSIGGIFAS

SEQ ID NO: 16647 - protein, 9 aa, Bos taurus
EFGGSIYQK

SEQ ID NO: 16648 - protein, 9 aa, Bos taurus
EFGGSIYQK

SEQ ID NO: 16649 - protein, 9 aa, Bos taurus
EFGGSIYQK

SEQ ID NO: 16650 - protein, 20 aa, Bos taurus
MPYYLKTTALIVTILGFILA

SEQ ID NO: 16651 - protein, 20 aa, Bos taurus
MAPCLPFVPAFAMLVNIYLM

SEQ ID NO: 16652 - protein, 20 aa, Bos taurus
FEGTMTSIFAQIISVALILI

SEQ ID NO: 16653 - protein, 20 aa, Bos taurus
FLGTYWAAVPAVLDLWLTQG

SEQ ID NO: 16654 - protein, 20 aa, Bos taurus
VIKMFMGSLFNVIGACIIIL

SEQ ID NO: 16655 - protein, 9 aa, Bos taurus
LETAVNLAW

SEQ ID NO: 16656 - protein, 9 aa, Bos taurus
LDTSVNLAW

SEQ ID NO: 16657 - protein, 9 aa, Bos taurus
IETSINLAW

SEQ ID NO: 16658 - protein, 20 aa, Bos taurus
ECVGNCIVLFASLFAVISRH

SEQ ID NO: 16659 - protein, 7 aa, Bos taurus
ACFSAKV

SEQ ID NO: 16660 - protein, 7 aa, Bos taurus
ASISAKV

SEQ ID NO: 16661 - protein, 7 aa, Bos taurus
TSLSAKV

SEQ ID NO: 16662 - protein, 9 aa, Bos taurus
RFGIAAKYK

SEQ ID NO: 16663 - protein, 20 aa, Bos taurus
ECVGNCIVLFASLFAVISRH

SEQ ID NO: 16664 - protein, 7 aa, Bos taurus
ACFSAKV

SEQ ID NO: 16665 - protein, 7 aa, Bos taurus
ASISAKV

SEQ ID NO: 16666 - protein, 7 aa, Bos taurus
TSLSAKV

SEQ ID NO: 16667 - protein, 9 aa, Bos taurus
LIGLGYTQT

SEQ ID NO: 16668 - protein, 9 aa, Bos taurus
LIGVGYTQT

SEQ ID NO: 16669 - protein, 9 aa, Bos taurus
LIGLGYTQT

SEQ ID NO: 16670 - protein, 9 aa, Bos taurus
GIKLTLSAL

SEQ ID NO: 16671 - protein, 9 aa, Bos taurus
GVKLTLSAL

SEQ ID NO: 16672 - protein, 9 aa, Bos taurus
GVKLTLSAL

SEQ ID NO: 16673 - DNA, 1392 bp, synthetic construct
  source 1..1392: mol_type = other DNA
atgttcgtgttcctcgtgctcctgcccctcgtctccagccagtgcgtggggtccataggggctgcttctatggagttctgttttgatgttttcaaggaactgaaggttcaccatgctaacgagaacatcttttactgtccaatagccatcatgagtgcgcttgctatggtttatttgggtgcaaaagattctactcgcactcagattaataaggtcgttagattcgacaagcttccagggtttggagacagtattgaggcccaatgtggaacgtcagtcaacgtccattcttctctgcgggacattctcaaccaaataacgaagccaaacgacgtgtattccttctcactcgcgtcacggctgtatgctgaagaaaggtatcctatcttgccagaatatctccagtgcgtcaaggagttgtatcgaggcggactggaaccgatcaactttcagactgcagccgaccaggcccgcgaactgatcaacagctgggtcgagtctcagaccaatgggatcatacgcaatgtgttgcaaccgagtagtgtcgactctcagacggctatggtcttggtgaacgctatagtcttcaaaggtctgtgggagaagaccttcaaggatgaagacacacaagcgatgccattcagagtcaccgaacaagaaagcaaacccgtccaaatgatgtaccaaattgggctttttcgggtggcctctatggcctctgagaaaatgaaaatattggaactgcccttcgccagcggcacaatgagtatgttggtccttcttccagatgaagtctcaggtctcgaacagcttgagtctatcattaactttgagaaactcactgaatggacttcttccaatgtgatggaagaacgaaaaatcaaagtctacctgccccgaatgaagatggaagagaaatataatttgacatcagttctgatggccatgggaatcacagacgtgttttcatcctctgcgaatctgtctggcatatcttccgcagaatctctcaagatcagtcaagccgtccacgcggcccatgctgagataaatgaggcgggcagagaggtggtggggtccgccgaagctggagtcgacgcagcttctgtcagtgaagaatttagggccgatcatcctttcctgttctgcataaagcacatagctacgaacgctgtgcttttctttggcagatgcgtttctccaccctggtacatctggctgggcttcatcgcaggactgatcgccatcgtcatggtcaccataatgctctgttgcatgacctcctgctgtagctgcctgaaaggctgttgcagctgcgggagctgctgcaaattcgacgaagacgatagcgaacctgtgctcaaaggggtgaagttgcattacacatagtga

SEQ ID NO: 16674 - DNA, 3267 bp, synthetic construct
  source 1..3267: mol_type = other DNA
atgttcgtgttcctcgtgctcctgcccctcgtctccagccagtgcgtgaccgaaaactttaataacgatctgagcgataatggcctcaatgacaacacgttgagcgataatagtctcaacgaaaataccttgagtgataatactctctcagataaaagcctctccgagagcaccatcatacaaaatgaccacgataacctgaaggatacaaacaacaacgataataacaaggccctcaaggatccggcgaagacgtttacggacctccaaatggaaataattaatgcctctgatctgctcgaattgacggatgattacaagtacaataacgagacggataatataacgcttactatcagtaagagtaatttcgttattaatggtaacgggcataccatcgatggggacaaccaatgcggaatttttcaaattaacggaacgaatataacgctgaaaaatctcaacatcataaatgcgaacagtacaaaggactccgcccttcttctcaatccaggttccgaactcgaaaccaacaatgtcacttttatcaacgacagttctgataaacgcgtcattttcgccttcggtgctaagtacaccagtaacaacgacaagttcatagactgcacatcactcaatgatggtgttattaattcctatttgggcgaaatcaccatcaataacggatacttcgaatctagtaaacctctcgactgggcgttcgtgaattctctcggcaattctagcatctatgtccttaacactactttcgctaataccacatctaaatatgccaccgcgatcaagggggatcgcgagacagtcattcacgacagtaagttcattaacttgtatgcgaatctgaccgcgggcgcgatcggactcaaacgaatcgaggaggctgaaattgataactgcacatttataaacgtgtcaagtcaaaagaatgggggtgcgatcttcttggatatctacagtgactccgaagatgtccctataatgatttcccggtctagctttgtcaactgctacagtgagttcggaggagcaatccttagcctgggcggaaaaattacacttgaggaggataattttacgaataacggcgcgttttttgatgggggtgcgatttattcctcattctctcaactcacgataagccaaacaatattcgataacaactctgtggaactcgacgacgaccgggggagttttggcggtgcgatcttctccgatatctctgcattgattattcttaattgttcctttagcaacaacaatgcgcaaactggcggtgctctgtacacctacgactctggatattacatcgccaattctacttttaaagataataccaacaaagagagcgagttcgacgatattttcaccgatttcgacggggaaatcgcaacactggaaaacaattcctacagtggggaggattccatctgtcttaataacgaacgatacgaaagtgttatagccgttagcggaatgaactttactttgatcgagaatgagatcaatgtgaccaatcccccccggaagtttgaccttcgggaatggggctgggttacgcctgtgaagaaccaggggtatatgggcagctgttgggctttcggaacagttggagctatcgaaagttcaatccttagatttcttggactggagatggacatatccgagaataatatgcaagatagcctgcttcagtattaccgatatgggacgctcggcgcagaggaaggcggtgagtataatcttgggccgagttatgcgttgtcatggttcggggtttttccctctgaatatgatgtttatgatgagctggggaaaatatctgcaataatcgcgaccgacgattcaatacacctccaggatgctgtgttcgtgcctcctctcatgaattcaacagacaaagataaattgaagcagagtctgctcaagtacggcgcactggcagtttcctattacgcagaaacggacgaaccgggcctgaatgagaacacgagttcacaatattctctgaagaatgattctaaccatcgcgttctcctcgtgggttgggacgatgattattctaaagacaatttttacatgaccccacctggcgacggcgcatggatcattaagaactcttggggggaggagctgggagataaaggatattattacatctcctactacgacgcttctttcgcaacattggtccccagtgtgggttttccaataatgaataccgtcatctacaacaaaaactatcaatatgatatcggcggcacgctggaattcacagatatgggtaatgaatacgtgaacgaatttgaggccctggaagacgactttattgcggcggtcgggacgtactttatcgacgccggagtggattacaatattgagatctacgttaacgacgagctcaagtattcccaggacgggactagtcccttttttgggtttcacactatacaattggattcatatgtccccatcaaagaaggagacgagttcgatgtcaaaatcacgagcgattgcattccaattcttgagagtgggcggcaacactatatcgaaaataagtccgcagccaatctgaatggtgaatgggtcgatcttaccagtgatgggaaagtgtgtgccattaaagtttacacaacggacgaagacaaaaaaaaggagtcttccaggataaatactaggatagattgtaagaacatgaccacaacagcggttgcctccgaagatggaagaataggcgagtatttccaggtgactttgaaagatgagaacgggacggctctggctaataaaccaataaaaataggtttcaatggacgagtgtacgatagaacgacggacgagaatggatctgcaaaactccaaattaatctcgcttataaaggcacatacacgttcgccattgggtttttgggagacgaagaatatctgggtgcttttgaagtggccaaaatcaccgtgaaggttcagacgcccaagttgacagcgccgaacaaaagttataaagtgtccgccaaaaccaaatcactcactgccagctttaagactgcgaatggcaaagcggtcagtgggaaaaagatttcattcactgtcaatggcaagacttatagcgcgaaaacaaactccaaagggactgcgaccgtcaacgttagcctcaacaagaaagggacctattcatttaccgtgaagttcgcgggtgacgatacctttgcaacctcatcagctaaagcgaagcttactctgaagtga

SEQ ID NO: 16675 - DNA, 1206 bp, synthetic construct
  source 1..1206: mol_type = other DNA
atgttcgtgttcctcgtgctcctgcccctcgtctccagccagtgcgtggggtccataggggctgcttctatggagttctgttttgatgttttcaaggaactgaaggttcaccatgctaacgagaacatcttttactgtccaatagccatcatgagtgcgcttgctatggtttatttgggtgcaaaagattctactcgcactcagattaataaggtcgttagattcgacaagcttccagggtttggagacagtattgaggcccaatgtggaacgtcagtcaacgtccattcttctctgcgggacattctcaaccaaataacgaagccaaacgacgtgtattccttctcactcgcgtcacggctgtatgctgaagaaaggtatcctatcttgccagaatatctccagtgcgtcaaggagttgtatcgaggcggactggaaccgatcaactttcagactgcagccgaccaggcccgcgaactgatcaacagctgggtcgagtctcagaccaatgggatcatacgcaatgtgttgcaaccgagtagtgtcgactctcagacggctatggtcttggtgaacgctatagtcttcaaaggtctgtgggagaagaccttcaaggatgaagacacacaagcgatgccattcagagtcaccgaacaagaaagcaaacccgtccaaatgatgtaccaaattgggctttttcgggtggcctctatggcctctgagaaaatgaaaatattggaactgcccttcgccagcggcacaatgagtatgttggtccttcttccagatgaagtctcaggtctcgaacagcttgagtctatcattaactttgagaaactcactgaatggacttcttccaatgtgatggaagaacgaaaaatcaaagtctacctgccccgaatgaagatggaagagaaatataatttgacatcagttctgatggccatgggaatcacagacgtgttttcatcctctgcgaatctgtctggcatatcttccgcagaatctctcaagatcagtcaagccgtccacgcggcccatgctgagataaatgaggcgggcagagaggtggtggggtccgccgaagctggagtcgacgcagcttctgtcagtgaagaatttagggccgatcatcctttcctgttctgcataaagcacatagctacgaacgctgtgcttttctttggcagatgcgtttctccatga

SEQ ID NO: 16676 - DNA, 288 bp, synthetic construct
  source 1..288: mol_type = other DNA
atgttcgtgttcctcgtgctcctgcccctcgtctccagccagtgcgtgtacctcatgacactgagcctgccagggttcgcacatcccttcgcactccccccctggtacatctggctgggcttcatcgcaggactgatcgccatcgtcatggtcaccataatgctctgttgcatgacctcctgctgtagctgcctgaaaggctgttgcagctgcgggagctgctgcaaattcgacgaagacgatagcgaacctgtgctcaaaggggtgaagttgcattacacatagtga

SEQ ID NO: 16677 - DNA, 288 bp, synthetic construct
  source 1..288: mol_type = other DNA
atgttcgtgttcctcgtgctcctgcccctcgtctccagccagtgcgtgtacctcatgacactccccctggacggactcgggcaccccttccccctgccaccctggtacatctggctgggcttcatcgcaggactgatcgccatcgtcatggtcaccataatgctctgttgcatgacctcctgctgtagctgcctgaaaggctgttgcagctgcgggagctgctgcaaattcgacgaagacgatagcgaacctgtgctcaaaggggtgaagttgcattacacatagtga

SEQ ID NO: 16678 - DNA, 291 bp, synthetic construct
  source 1..291: mol_type = other DNA
atgttcgtgttcctcgtgctcctgcccctcgtctccagccagtgcgtgtacctcatgaccataccactgaacggcaccccactccacgccttcccactgccaccctggtacatctggctgggcttcatcgcaggactgatcgccatcgtcatggtcaccataatgctctgttgcatgacctcctgctgtagctgcctgaaaggctgttgcagctgcgggagctgctgcaaattcgacgaagacgatagcgaacctgtgctcaaaggggtgaagttgcattacacatagtga

SEQ ID NO: 16679 - DNA, 291 bp, synthetic construct
  source 1..291: mol_type = other DNA
atgttcgtgttcctcgtgctcctgcccctcgtctccagccagtgcgtgtacctgatgataatcccaatcaacgggagtgcactccacatcttccccctcccgccctggtacatctggctgggcttcatcgcaggactgatcgccatcgtcatggtcaccataatgctctgttgcatgacctcctgctgtagctgcctgaaaggctgttgcagctgcgggagctgctgcaaattcgacgaagacgatagcgaacctgtgctcaaaggggtgaagttgcattacacatagtga

SEQ ID NO: 16680 - DNA, 279 bp, synthetic construct
  source 1..279: mol_type = other DNA
atgttcgtgttcctcgtgctcctgcccctcgtctccagccagtgcgtgtacctcatgacggtggtgctcggacacccattcccgctgacaccctggtacatctggctgggcttcatcgcaggactgatcgccatcgtcatggtcaccataatgctctgttgcatgacctcctgctgtagctgcctgaaaggctgttgcagctgcgggagctgctgcaaattcgacgaagacgatagcgaacctgtgctcaaaggggtgaagttgcattacacatagtga

SEQ ID NO: 16681 - DNA, 3453 bp, synthetic construct
  source 1..3453: mol_type = other DNA
atgttcgtgttcctcgtgctcctgcccctcgtctccagccagtgcgtgaccgaaaactttaataacgatctgagcgataatggcctcaatgacaacacgttgagcgataatagtctcaacgaaaataccttgagtgataatactctctcagataaaagcctctccgagagcaccatcatacaaaatgaccacgataacctgaaggatacaaacaacaacgataataacaaggccctcaaggatccggcgaagacgtttacggacctccaaatggaaataattaatgcctctgatctgctcgaattgacggatgattacaagtacaataacgagacggataatataacgcttactatcagtaagagtaatttcgttattaatggtaacgggcataccatcgatggggacaaccaatgcggaatttttcaaattaacggaacgaatataacgctgaaaaatctcaacatcataaatgcgaacagtacaaaggactccgcccttcttctcaatccaggttccgaactcgaaaccaacaatgtcacttttatcaacgacagttctgataaacgcgtcattttcgccttcggtgctaagtacaccagtaacaacgacaagttcatagactgcacatcactcaatgatggtgttattaattcctatttgggcgaaatcaccatcaataacggatacttcgaatctagtaaacctctcgactgggcgttcgtgaattctctcggcaattctagcatctatgtccttaacactactttcgctaataccacatctaaatatgccaccgcgatcaagggggatcgcgagacagtcattcacgacagtaagttcattaacttgtatgcgaatctgaccgcgggcgcgatcggactcaaacgaatcgaggaggctgaaattgataactgcacatttataaacgtgtcaagtcaaaagaatgggggtgcgatcttcttggatatctacagtgactccgaagatgtccctataatgatttcccggtctagctttgtcaactgctacagtgagttcggaggagcaatccttagcctgggcggaaaaattacacttgaggaggataattttacgaataacggcgcgttttttgatgggggtgcgatttattcctcattctctcaactcacgataagccaaacaatattcgataacaactctgtggaactcgacgacgaccgggggagttttggcggtgcgatcttctccgatatctctgcattgattattcttaattgttcctttagcaacaacaatgcgcaaactggcggtgctctgtacacctacgactctggatattacatcgccaattctacttttaaagataataccaacaaagagagcgagttcgacgatattttcaccgatttcgacggggaaatcgcaacactggaaaacaattcctacagtggggaggattccatctgtcttaataacgaacgatacgaaagtgttatagccgttagcggaatgaactttactttgatcgagaatgagatcaatgtgaccaatcccccccggaagtttgaccttcgggaatggggctgggttacgcctgtgaagaaccaggggtatatgggcagctgttgggctttcggaacagttggagctatcgaaagttcaatccttagatttcttggactggagatggacatatccgagaataatatgcaagatagcctgcttcagtattaccgatatgggacgctcggcgcagaggaaggcggtgagtataatcttgggccgagttatgcgttgtcatggttcggggtttttccctctgaatatgatgtttatgatgagctggggaaaatatctgcaataatcgcgaccgacgattcaatacacctccaggatgctgtgttcgtgcctcctctcatgaattcaacagacaaagataaattgaagcagagtctgctcaagtacggcgcactggcagtttcctattacgcagaaacggacgaaccgggcctgaatgagaacacgagttcacaatattctctgaagaatgattctaaccatcgcgttctcctcgtgggttgggacgatgattattctaaagacaatttttacatgaccccacctggcgacggcgcatggatcattaagaactcttggggggaggagctgggagataaaggatattattacatctcctactacgacgcttctttcgcaacattggtccccagtgtgggttttccaataatgaataccgtcatctacaacaaaaactatcaatatgatatcggcggcacgctggaattcacagatatgggtaatgaatacgtgaacgaatttgaggccctggaagacgactttattgcggcggtcgggacgtactttatcgacgccggagtggattacaatattgagatctacgttaacgacgagctcaagtattcccaggacgggactagtcccttttttgggtttcacactatacaattggattcatatgtccccatcaaagaaggagacgagttcgatgtcaaaatcacgagcgattgcattccaattcttgagagtgggcggcaacactatatcgaaaataagtccgcagccaatctgaatggtgaatgggtcgatcttaccagtgatgggaaagtgtgtgccattaaagtttacacaacggacgaagacaaaaaaaaggagtcttccaggataaatactaggatagattgtaagaacatgaccacaacagcggttgcctccgaagatggaagaataggcgagtatttccaggtgactttgaaagatgagaacgggacggctctggctaataaaccaataaaaataggtttcaatggacgagtgtacgatagaacgacggacgagaatggatctgcaaaactccaaattaatctcgcttataaaggcacatacacgttcgccattgggtttttgggagacgaagaatatctgggtgcttttgaagtggccaaaatcaccgtgaaggttcagacgcccaagttgacagcgccgaacaaaagttataaagtgtccgccaaaaccaaatcactcactgccagctttaagactgcgaatggcaaagcggtcagtgggaaaaagatttcattcactgtcaatggcaagacttatagcgcgaaaacaaactccaaagggactgcgaccgtcaacgttagcctcaacaagaaagggacctattcatttaccgtgaagttcgcgggtgacgatacctttgcaacctcatcagctaaagcgaagcttactctgaagccctggtacatctggctgggcttcatcgcaggactgatcgccatcgtcatggtcaccataatgctctgttgcatgacctcctgctgtagctgcctgaaaggctgttgcagctgcgggagctgctgcaaattcgacgaagacgatagcgaacctgtgctcaaaggggtgaagttgcattacacatagtga

SEQ ID NO: 16682 - DNA, 4143 bp, synthetic construct
  source 1..4143: mol_type = other DNA
atgttcgtgttcctcgtgctcctgcccctcgtctccagccagtgcgtgtctgaaacaaaccttgattccattgagctgaacgatctggcggattcttctactgagatcgatgactctaccgatttgaatcaagattactccagtaatcaagatctttctttgaatcaaaatagcgactcaaatctgagtaacgaacaggaactttattccaataagctgtccgagaacagcttggactccaattcccagtcctccaatgaccttagcaatagcttgtacttgtctagtaacggggttcggctcgctgacctcaactcctcattcgctcagtttaacacgagtctgaacgattccaacacgatctatgttaactccagctacattggttctgacgaatttggtacccaatcaaatccttataaaacggtccttgcgggtattaatgctgccacgactgaccttaataatgtctacatcgcgaacggggtctataatatcaacaccactattacagttcttaagtcaattaacataatcggggaatctctgaatgttattctcaatgcctctaacgaaaataatatactctctgttaaaggttcttctgttgaagtctcaatattcaatctcacctttcggaatgggtatgctaataaggggggagcaatatacgtcgataagtcttctctcaacattatagggtcactttttgacagcaatatagcctatgttacatctgataatggctacggcggtgcaatttacaataatgcggggtttttgaagctttacaacactacttttaaaaacaacaaggtcgtggcagcatataacatagtgagcgaggggttcgggggggcgatctacaatgagcttggtgagatgacagtgctcaattcaaaattttacaataactcaatcgacatcaggaacattagcaagtcttcttacggggccggtggagctattttcaatcgggctggcttcgtgacaatctttaatagctccatctctaacaattcaatttacacgaattacagtctcggtggagctatatccatttgggcttctcgaaatgtttacatcatcaatagcaccattaacgacaacatcattagcggatcatatggctttgcttcagtcatcagcaataaagggacgctgttgcaaattgagaattctaccatatctaacaataacattaatgcttcttccgttgaaaatagtacaatttataatataaacgggaactttaaccttattaatagtaagatggaaaataataagatcaagactatcaaaacaaatttgttgatgtgtttggaagatcagctcattgttaactcatcatttaatctcgcgaacgaacttaaaggactcaacatgacatcccttccatcacattacgatttgagggaggagggcctcgtgacagccgtgaagaatcaaggaagttctggggcctgttgggcgtttgccttttactcagctatggagagttatctgttgaaggtggagaatataagttatgatttctcagaaaacaatatgaaaaattgcatgggtgatggtagtgaaaactctacggactgggatgacgggggggcctatgtcgtcgcacttgcttacctgttgaggtggtctggagcaataaatgaaacggacgatccttttaatgctagaagcaaggtcagtcccaccaatctgacccgagttaagtatctcacggacgcactgtacataccgcttcgcctcggggccttggataatgatcagattaagacggcgattcttaagtatggggctatctttgttccggtgtattccaatattataaaagcaaacagtaagagtggctactcagatattcaatacatatgcaaccatgcagtcgcaatcgtcggttgggatgacaactattccgctagcaactttaaagacacgccacccggagatggagcctttattataaaaaacagctggggaacgtcaggcggcgaacagggatattactacatttcttattacgacgccagttttgctgctagtatagaaacttcagccgcagtggcagtgaccaacgttgttaatacaaccggtgagtaccgcaataactattactacgacacattcggaaatacatttgagacgatcggttacaactctgatacaatctggtttgccaatcagtttaccgcgataagtgacaacccgttgaacgcatttggcctgtacacctacggtgactctacgtacacagttaatattacagttaataacaaatcagtctatactagcagtgggaaaattgtgggtgctggatttcatacaataaagctgagccgatatgtgcctctcacgaagggtgacacgttcaggattattgtcaagctcacaacgcctagtacattgttcccgcttgcggttgagaccaattactccggttttaccccacgcgccaagtctgactacaatcaatcttttatatctccagacggcaagacgtggtatgaccttaggaacagctccaataacagggcggtgaaattttacgaagatatgtatttttacacgctgaagaatgccagtgtctgtcttaaggcctatactgcctttgcggatgaactcgagttgaacctgagctccaacagcccgatatactatacgggtgatacgatcaagcttaacctgacggtgaccaacagaggagatcttgcaagtaactcttccattgcagtcccgctggacaaaagttatagtatagtgtcctataaaatctctgagaataacggcaacaaaagctatgacattcactacaacggcagctcttttaacatggcttccggcatatggtctatcccttaccttgaaaatgaggaatccgtctccctgatcctgagcctcaaaatgaattctaataacgacgttaatataaaggtctcagccaacagcagtagttgctccgttaaggataatgtttacgccaatatatctctcaagtacaaaattcctagcaagtttgcgaatattcccagtattaatacgaccgctcggtcctatggtttgcttaattttacgctcctggacataaataacaagcctctcgccaataaaaacgtcaatctcttgctgctgaagctggacgatgaagaggatgaggatctctctctgaatgataccaatctttattacagtgattcctccattagtaacgcatcagttatatctaacttgacgcttaaaacaaatgggaacggcattgtccagtataagcttaacctgacgcttggtgagtacctctttaaattggcgttcgatgaagacaaaaattaccaggcgtcagactacaactacagtttgaacataacaaaaagaaaaagtacgaaaatattgtgtaaggacatggtgacgtatagcgtcgtcgccgaagtggatggacgatccggtgagtattttaatgttacgctgactgattgcgatggctatgctatggccgataagtttatacagattggattcaacggccgcatatacaaccgaactacagattctgagggtaaggctaggcttcaaataaacctcaagaacccgaatgcgtatactttcgctatatgtttcctttctgatgatgactactacgctagctttgaggttgcaaagattactgtgaataaaaaaaagatgagtcttaatgtgcccaacaaggcttataaggcatccgaaaaaagtaaaatactgactgccaccttgattgaaaacaacaagaaaacagtcgctaacaaacttcttacgttcacggtggacggtaaaacgtatagcgctaagacgaacagcgccggggtggcctctgttaaggtcagcttgtcatccaagaagatatattctttcacggttaaatttgcgggggacgattgttatggtagtgcgactaaaagcgccaaagtgattattaaaccctggtacatctggctgggcttcatcgcaggactgatcgccatcgtcatggtcaccataatgctctgttgcatgacctcctgctgtagctgcctgaaaggctgttgcagctgcgggagctgctgcaaattcgacgaagacgatagcgaacctgtgctcaaaggggtgaagttgcattacacatagtga

SEQ ID NO: 16683 - DNA, 5574 bp, synthetic construct
  source 1..5574: mol_type = other DNA
atgttcgtgttcctcgtgctcctgcccctcgtctccagccagtgcgtggctgatttgaataccgtccaaagcggggaggtcagcggaggggtggacatagccagcagcaacccgggtgtcgagaatggagagctgacctacgaaattcccgactccgtggagaacattcaatatgccggtcttttcgtcgatagctacacggcgggttcatccaatttggtgtatgggagcgaggccaacataacgttgacaaagaatggcgagagtgaacagatcgcgagcgaaagactggtcgcttcagtcggaagtgcagatggagaagtgtatgttatcaatgatcataccaccaaatgttttgctgactacatgatgacttacaatttgacagatcggctccaagacgcgaagggcaatattactatcacggtcaatgcaacaccaatagagggatacacattttacaataaaattaaacttataggtctggtttttacgtatgatgacggcgatggcgatcagttccactactgggtgaatgctgggtcatcttgggttaaaactgatagtggtgaaacatcaaaagcaaccttcaaactgggaaacgtgaattacgatcccacggtcgcgacacttgacaactttgctctttcttcacaggatggcgtgtatacattcaatggtaaagagatggacgagagcatagtgacagagacaggcgtctattattatatccatcacaagttcgacatactcgacaagatcaagaacatgacaaatacgctcgtgtacacgcctggagaggggtcttacagtttcagaaacgttctcagcgtcgtcaaactcgtcaaaactgtcccggtttatgctaaagtgaatatttcctccgaatatgacgatatcgtcttttcaggcaccgagaaccttctgaaggttggaataaccaacaatggaactgggtctgcaagctatttgcttgatttgtacgccgacggaaagaaagtgaacagttctcagatttccctcgccgcaggccgagaggcggtgatctctctgatcgataacactattcgaccttccgccgcagacactgtgagtggtgcggataataaaaagattaactacaccgtcgtcgtttctgataagaacacaggtgaggtgctcgacgaatcaagtatctttcctaatctcctctataacggctacctggggaagggccttgcctatcccgccgagaagataagtagcttcaaaaatatcacagtcaacggcggcatgatcattgaatcccttggggattctacatacctggacgccagtatgaccggaaagactgatagttggacaatcgatttgcctgatggcgcattctttacagacgcattcgtctacgtcccgtacaatctcgataatggcaatgtgccgatgtttaccagtaccttcaacggcgcagcggtgaatcccattgcgagctacagagatcagccaaatatcggtgaaaatgccaaaaatgggtatggcctgcttgtctatgatgtgggcgaattgattaaagcaggggttaactccttcgcactttccaaagaggccggtatagccggtgtctacccttctacactcatagcattctataacctgacggattcagacctcttgactagtgcgttcatattcaacggggccgacctgttgtcaaatgaatacaatagtctgggtagagacgtgagctcagataatattcttagtataggagcgttcgacgggctggtctccgccaagcttcacgtctttgcagcggattgccaagccggcgagggggacctgacagtcaacgggaagagttataaaaatgtgtgggcggggacaaaccgctccgtgggagattacgttgtcgacttggggaagtccactaatgcatccaatgaggtgtctttcatcagtactgcctctaacattcttgccctccaacagcttgcggtggttcagtataatgtgcccagtgtgaaggcttcacttgtttctgaatactccaatgccgtgttcgcgggaactaataacgtcttgtcactcaacataacgaacaatggaaagtttgacagcatttatacagttgatttctatgtggacggtaaaaagcaaaatagtacggaaatctcacttaaaagcggcgcgaacaagggcctctatctgatcgatgataccataaggccaatcgatgcttctaccgtcaacggtgcagacaacccgaaagtgaattatacagtcgtgataattgacaaagagaagtccatggtccttgatgagataaccatcactcccagtctcctctataatggtaatcttggtaaggacctggcttaccccgcagaaaatatcacttccttccgcaatatcactgtgtcaggtggggtcattgtcgatacgctggacgatagtacttatataaactcacaggccaccaataggactgacatctggaatgttaatgtggctgacggggatgttttcactgatgctttcgtttacgtgccatataactgggacaagacgaacggatacatgccagtctggaacgctaggtttaatggggtggcggtgtctccccttgttagttaccgagatcagtccaacatcgggttctttggaaaaaatggatatgggcttgtggtctacgatgtctcaaaactgatcaagagtggtgaaaacacattcacactcgaaaaagaggctggtataacggccgtttatcccagtacacttatggcattttacaatgccacttcatcaaactccctcaaaacaatttacatctacaacggggccgatcttttggctaacgaaaacaactttctgaacagaactgtggcctctgattctcacttggatataagtagctttaaggaggttattagtgcgaagctttatgtgttttccgccggagctcagaaaggtgagggtaatataattttcaataacaaaacatataaggacgtgtggaatggcacagtcaatagcgtggactcatttatcattgaccttggtaaaagccccagtgtgtccaacgacgtgtccttcgtcagcacgggcagtacgattatggctttgcagcaacttatagtgttggattactacgtgtcatccgttaaggcaaacgtgagcagcgaatattccggggcagtcttcgccggtaccgacaacgtcttgaaggtcgacctcacgaacgatgggcagggaggctctgtgtacgtcttggatttttacattgatggtaaaatagtgaactcaactgaaatacctctggacgcaggaaaatccacggagatatttctcgtggatgacaaaattcgaccagtggacgctagtacggtgaacggagcaaataatgccaaggtcaactacaccatcactgttactgacaaagcctccggtctggttctctatgaggcaagccttaatcctatagtcttgtacaacggcaatcttggaaaagatctggcatacccggcggaaaacataagctttttcgacgcgatcactgtgaatggaggcgtgatcatagatacacttgacgactctacttacctgggagctaagacgaccggcagaacagatgtttggaaagttgaaatcccgaaggatggtaaaatcgttgatggattcgtttatgtgtcttataattgggataagactaatgggagcatgcccatctggaacgtgagcttcaacggagttagtgtttcaccagtcgcgcattatagagatcagtctaatatgggtacctatggcaagtacgggtacggcctggttgtctatgacgttggggagttgatcaagagtgcggaaaataaattcactctggaaaaagagaatggaaccacagccgtctacccatctacactccttgcattttacaataggacggagtccaataaccgcacaacggtctatatgtataacggcgcagacctgctgagcaatgcgaataatttcctgggacggacagtggccagtaatgctgccctcgacctcgctctgaacccaaacgatgaaataaaatcatccagactctatgtttttgccgcaagcgggcaatctggtgagggtaaactgatagtgaataacaaaacattcaataacgtttacaacggtagcgctaatagtgttgatgcatatatcatagacttgggcaaatctccgtccgccagtaataacgttagtttcatagcaacagggtcaactatccttgccctgcagcaattcgtggtcgtggacgcaatacaccagagttctgaggaacttcaaaaaatgataaatagcgcaagggcggggagcacattgaaccttgggtctaatgtctttaaagacgtttctaacgttataattaataaagatctgactatcacggggggaaccatttacgcgagggagggcgagacgatctttgtcgtcaccgatcgaagtgcgggtggcccgaaagaagtgaacattacgggggtgaaattcgtcctcgataacgctaacacgatcttgcaagctagggcagtgaacgggagtacacctacgagcatcgacgtcgcaagtataaatatcaagaaaaacaacatatcctttgttgatgacgatgttgttcccgagagtatcacagtgctggacctcaaaagtcaacgctccagcattgcaccaacacggaacctcaccatctccggtaataacttgatagccggaatctgccccttcatgtttgaggttacttcattcaatgggaaagactcagttgtggtgccagagggaggaaatatcccagataaaaaggcgagtgtcatacactatgaagacatggtcaccaccgcaattaacacaaacatagaagggcgggtggggaaatattttgaggttaatcttacagattcaaatggtaaccctcttaaggataaaaaagttcaaatagggtttaacggcgtggtttatgaccgcaccactaacgcgaccgggggcgttaaactgcagattaaccttggatacaaaggaacatatactttcgctattgcattcctgggcgatgactactacaatggaagtttcgttgtcgcgaaaataaaagtgaatactcagaagactaaaatcagcacctcttccaaaacgtacaaagcttcagctaagacgaaggcgatatcagcaaccctcaaggacgcgtctagcaatcccatttcaggcaagaagctcagtttcaccgtgaacggcaaaacgtatagcgcgactactaatagtaaaggtactgctacagtcaatgtctcccttagcaagaaaggaacctacagttttacggtgaagtatgcaggagatgacatgtacgctggtgcgactagttccagtaaggtcgttataaaaccctggtacatctggctgggcttcatcgcaggactgatcgccatcgtcatggtcaccataatgctctgttgcatgacctcctgctgtagctgcctgaaaggctgttgcagctgcgggagctgctgcaaattcgacgaagacgatagcgaacctgtgctcaaaggggtgaagttgcattacacatagtga

SEQ ID NO: 16684 - DNA, 4134 bp, synthetic construct
  source 1..4134: mol_type = other DNA
atgttcgtgttcctcgtgctcctgcccctcgtctccagccagtgcgtgaacgacgatatccttaatatcaatgtcaccgacactcaagattccgttattgataactctaacgggatttcagattatttttcttctgacaacgggataatcaacgacgacgggttgagtagtgatgacgagacagccgggtcccagcttcttaatgactctgaagatcttgattcttccgatgatctcgccaaagactctgatttggaagattcaaaggagacgagcaaaacacaagataactctcagaaaaatgaagactctaagacaagactttcagactcatcaattatccgcatcactgatagtagctactcatcttattttgatctttccaaggatggtgctattagagaggggacgataaaggacggggatacgctgctcataggaaatgtgtccggcaaaatattcagcataacgaagaacattaatatccttcccatttctgacggtgatacgatgagtaactgccttattcggttgatagaagggagctccggaactagcttgtccaatttgcgcattgttaataggaacgaaaaagtcggatctttttacctgtgtgggattcacattattaattccgcagggcacgatatcgtgaacctgacgatcaacaacagtcaaatgaaatgttatggaattataatgagcaatgccagcaataaccgaatcataaactcaacgatcattactggccaggcgacagctatacctatgacgggaagcagtaataaccttttttacgggaattacatagagacgtacaacacaaatatgatctactattgtatgtatggtaacggagacttttacccgcgggaggatttggagaaatcacacgacaatattattgctaataattactttacctcacgaaacgggacgtatgacagttattgttactccgtgtgtctcatggcagaggctggaggttctggaacagtgattgccaacaataccttcaacaatacctttcgcccgataacagtttccactccggacactcttgtgataaacaacaccatccttaacgtggggggggaagccggcataatcgtggatggcaacaacgtgacgataatgaataacaatatcagcactaagaggctggagggcttccaatggaacaaggaaggtgacgtggtgggaatctttacctatggcagcaatactcggataatcggaaacagcatcgataccgttggtaccaacggtattcgatctagcggcgatgctacatttatatctgggaatactatcaacactgagtcatctgcttgcataaacctcacgaagtcaaatgcagtggttgaggacaacgccctgaacggcatagggtcttctgctgtgcggatttatactagtaagcttgtggaaaacacaacgattaggaacaataacatatcaagtgactcagagggaatagtgctcaagggtaagatagattattcactcgtctgtggcaatatcattgaaataagcaatcctgaagacgcgattatagttggaaaatatacaaaccggaatccacttgtcccccagcattatgctattttcaataataccataaatgggatagttgtgaatttgacagacatctctgagatagagcgaaacgacacagattccgggttgaataatacaaacacctcagactccggcaataatggcacgggcaatacaggtaacggcaccaatatcactgacgttaacgggaccgacattaacggtacagacgttaacggaacgaatataacggatatcaacggtacggacgttaacggtactaacgtgaccgatgtcaatggcactgatgtcaacgggactgacgttaatggtactgatataaatggaacaggcaacgccactattccggtgaatataaccaaactgagtacatccatcacagtctacaatacaacggtcttgcgaggcgactacctggatgcctatttgaaagatcaatacggcaatccgattagtggggtgtcaatagatttccatttcaaggacaaagtttacgctaaaacaacggactctgaaggaaaggccagcttgcacttcgatgcgatccctgataactatacaatgaatataagctttacgggtaacaattactatttgtcttcaaatatcactatcgatatcagcgtgatacctgtttcatattacctgaatgagagtaatttttacgaatatttcggagaagatggttaccttaaaggagattatgaatatgcggacctgatcttccagggtgatttccggaataaacggatagtgctgaatcaaccactcaggattattagcgatagcgcggttttgtacgacagcattatcaaaatagagtccgataaggttgtcgttgatggtttcacgatcgttaatagaaaccccggaaacaagcaagacaatcacaggtttgcgatcctgttggactatgttagggatgtttcagtcattaacaataagatcaaactcgattcctatgatagtggctatggtatttacctgtctgagactcaagacagtactgtgtcaaacaactccatagatgtcaaagccgacaaattgaccttcggtataatactttacgacagtaaggacaacctcattcaggataatataataaaagtcaatggaaccgacgatccccatcagtacgaatccactattcaggtggacacgagcatttccgtggacgactacgaagcggagggaatgataatcccagaggtttacaaaacgtatggtataattcttttctatagttcatcaaacgatatcggctataacgtcattaacgccacctccggccttaagaaatattacactgctgtcaaggaaagtaccaactctattgtgggcgttgacctgtattatgatagtaattacaacaaagtccatcataataacgtcgtggtctctgcgaaggatccttacctctacgggctgggagttcttggcgccgagactgggaagcgagatcaatttgccaccaataactcctttaccgataatattgtgtttgtcaacgggacttattatgctgctggaataatagcggggtacaactcaatcaacaccacgatacttcgcaattatatcatatgcttctccaataacgtttcctatggcgtgatactcgagggggctctgaactctgtggttgatagtaactatgtgatcagccggtctcgaattaactatgtccttgaggggtatgacaccgattataacttgattagcaataatacattgaacgccttcggccagtatgtgggtgatgtttctctctacaacagtaaacataattacatcgcggggaacaaactttccccaattttccgggaggggagacttaaagacgcatctgaactccccggaggcgtcgattttgacgccatattttccgagctcggggttagtaaccctctccatgactatagtgataaagactggtctgagctgcttcgcaccgaccttacagaccatgctgacgttattccacctcataccggcgctttctacgacgacggcggagagggaaatatttttgtcgacaatgaagttccggcccccccttctggggggaatggccagaccaatcgaacaggatccggtgagacaaactcaaatggcaacggtaactcttcaaatggtagccagaactcaaactcaaattcaacggtcgttaataacaataatggaaattccggttctcaaagtgacatggatggcagtggtaacaacccggaaacggacacccttaagggcaacacggtcggcacatcatccagcgcagctgttacagaatccgcccgggcttacaatctcgacgtggacgaggacgcggcatcctcacggagtttgtcctttgggggtatgaacccctggtacatctggctgggcttcatcgcaggactgatcgccatcgtcatggtcaccataatgctctgttgcatgacctcctgctgtagctgcctgaaaggctgttgcagctgcgggagctgctgcaaattcgacgaagacgatagcgaacctgtgctcaaaggggtgaagttgcattacacatagtga

SEQ ID NO: 16685 - DNA, 5667 bp, synthetic construct
  source 1..5667: mol_type = other DNA
atgttcgtgttcctcgtgctcctgcccctcgtctccagccagtgcgtgggagacgtcgacgatctctccgacgcgggcaattacactagagacaattcccccctcacgatatcaagtacttatcaaagctccacttacggctctgatggggggtacgatgataagaatgagaatatttatatacttgataaggtgtccgatggtgataaatccaaaacatgttgtagcaaggatttgagtctggacaatgcttgctcaatggataaatcttcatgttctaaaagtaattcagcgtgctccaaaggcattagttcagacaaagattcatctaatctgtccaatacgtatctggtctcagagaacaattacaatgatttcaacgtcgacatagacttgaatgacaaacttagtgacctcgatctgaacaatgaccttagtttgaataaggatttgacacttaaccttaatagcaacaatgacatggactatctgaaccttgaagaggttatacagaccgacggcacgctcacctatgaaggggatttggaccagacctatttgaacgacgagagtttgaaccaggatgttcagaatgatgatagcctcaataagaatgatctcaaatctccacttagcgacgagaatactttcaacatatttattatttcagataacacaggaaacaacctttttgacgccgttgcctgcgaaatcctcgataactctaatttttccaacgtgaaattcaacatacgatcaggcaatcaaattaacgcgatgtcagaggatgaaatttacgagttgatggccccgtgtgacgctttcataggacagtgggtttcctcaaatgtggacgccgtccttacctctctgttgaacaaccatccggaactgtcaaataagaagttgttcctgatacttgaaccaccaaccggcaatataaacagcagttcttctagtctgaacttggttcggaacagtaccatagattataagaagatattcaatgggatttcaaacgacgatctgattaactattttaaggccactaagcgcggaaacaatttcgaaagtatccaagagtatatagacaatgaaggatcatctttcaattccattttcaacaaccttgttctctacaaggacatcaacgacaaagcgaatctgaagaatgaactcctgtatattctttaccttttgggccacggatgttcatatgaatccgccaacttcacgggggttcaggcaagtggtatattccgagatagatggtactccttcgacgagtatgtccttaccttttttaacgaatcccgcaatcgaacaataggaatacttgagtccacgatgtatatacagagtcaacagctcgacctcgtcaatgagataaccgaaaggcttgaaagcaagggttataatgtgatccctatatactgtccagccggaaatgccgagcagttgaacataatggttaaatattggacgtctgcatgtagtaacatcagtgggtttctggagaacccccaggactttgacatttatgtcgacggaataatctctatggtggcatatggcgtcggaggtgagaattttaccaatgctacaaagttctttgaagatgccaatgtgcctatatttcgggccgtgcattcagaatatatcactaatgagcaatgggaattgtccccggtcggactctctaccacaaagagtgataaatggtggcacgtgaccattgccgagtcccaagggatattcgatgcaacgtatgtcgggggggtggacagttatatttcaaatcgcacgggtgccatcattcttacatttgtcccagttcacgagaacatcgaactccttacagatcgggtggatgcgtgggtggatcttaaatacacgcccaacgaagacaaaaatatctccatcgtgtattataactaccccccgggtaaacagaacattggggcatcctatctggacgcgatcacctctgtttacaatatgctctatacgttgaaagacgagggctattacttgactgacctgcctaataacgtctcagagcttgaggatatgatgattgcttgcggcataaatgtcgccaattgggctcccggggaggtggagaagctggccaacaggtcaggtgttgccctcctccccgtcgatgaatatctggagtggtttgacagccttgacgacattgtcaaggtgcaaataaccgaaggcccagtggcatacataggacaaatggttcgcagggccgtccttataaactatacggacgaggttgagacaatggtgaacgactggtataaccaaatcaaggcactccttcctgaaaatcaaacagttgccgctacgaacatattggacaaacttgttaacagtctcaagctttatgccaatgcctcatcagatggtgacgaaaacgcaagcctgtattacgacgaattcctgagatactacgacgaattcaaatctcttaacgtctccggtcttaatggatggggggaggcgccaggaaatatcatgctggtgaatcgaaatggaacggactacttcgtcatccccggactcaccttcggcaatgtgtttattgggcctgagccccaacgcgggtgggaggcagatatagaaaacctgtaccactgtacggccgttgcacccactcaccaatacttggcagcatattattatatgcaaacaagacagagtaacgcgatggtgttcgtggggcgacacgccactcatgagtggcttccgggaaaggaagtgctgctctcttataacgattatggtagcattgtcgttggtaaagtcccccaagtttacttctatataacggatggtcttgctgaagccattcaggccaagcggagaggcttcgcggttctgatttcccatctcgactcacccaagtcatatacgcatctgtacgggaacctcaccgtgttggctacacttctcgaggaatatgataacaaccatatcataatagaatccgactctgacaaggataatcaagctataacatatcaagtcattaaagacaatcagacgataacataccaggttatcaaccaggaactggaagataacctcacccgggcgataaaagatctcgttattgcgaataattactacttgactattgggtttaccgcggaagaactcaacaatacagatatgttctcactctcttccactctcaatgcttttctcaagaacacgcaaaacacactgtacccgctgggattgcacgctattggccagaaatggacggacgaagatctcgcgaataccgttgctatcatagtttcccacgattttgagtacggcggtaaaaagacgaatctcttcgaccagctttctctttactattacggggagaagtacagtaatctgacaccgttgaagagagactatatattgaacaggtctgttgacgtgtgtaaggcgttgatctactgggacaccgaaacagtgagcgacacaatagggattggttctcccgagtttatagagtctctcaacattgcaaaaaaatatatcgacctgtacaaccagtgtatttcattggagctcgaagaaatggtgtccgcccttaacggaggttatgtccccgtcaatataggtggagaatccgttacagttccacaggtgctccccacgggcgctaatatgtaccaggatcaatcaagcgagttgccaacacagaaagcgtgggactatgccaagacactgtcattgttgacgcttgccgaccttaatgacactacagagaagataattatgggcatctggtgcgtcgagacggctcgggacgatggtgcccttgtcagcactgtcctttaccttcttggtatggaaccggtgtggcataacagtagtagcgccggtttcgatgaagaggggataccaacgggaaagaaagttgaggatctcccaaatgttatagcgctcgagaatctcacgcgacccgatggatgggctaaaaaacgaatcgacgtcaccgtcataacatcaggcctttttcgggatctttattcaagccaagccaggttgatggacaatgcatatagaatggctcttgcgtgcagttattatacgatagtcaacaacaagacaatcatggatagtgaatacggtccacaagtctatgacgctctgcgcagcattatgcggtccatttcctttaaagggatgtccaatgaatctctcgaagacaactatgtggcgaaacattggctggaagactgcatttactacctcagtcttggctataacagcacggtttcaggcgagtatgcgattacgcggatctttgctccccctaacggcgattacggagctggcatatctaagctggttagtatgtcatggacttggaatgacaccgacgaattgtcagaattttatatcggcaggatgggcaacatgtattctaaatattattggggtgacacgaacccggtggtctttatgagagccttgagtgacacggaccatatcgtggtttccagaaatactaaccaatacggggtgcttgacaacgacgatttctttgactattgggggggcctttctatgacagtggagtacttgtctaataagacacccactatgaatgtgttgatgtatgccaataaagataatgcttacgtggccaccttcgagaatgtcttctacaacgagctgaacacaagatatctgaatccggagtggataaaaggtatgatgcaagaggggtatagtggatcacgctatatgtccaacaaatttatttccaacctttggggatggcaggtgacgagaccgagctccgtgtccgagacagtctgggacgatgtgtataacacttactacaaagacaaatatggtctgggagttaaaagctggctccaatccggaaacaatgcgtacagtctgatttccatgagcggcacaatgctgaactccgcatactcaggttactgggatgcggatgacgccacactgtctgacatagccaatacttgggcacaggcaacggttgcgaatggtgttgcgtgttgtgactgttcctgtggtaacgtcgccatgatgcaatgggcgttcaagtacgttaacgctgatttgttggcaaaattgatgccgaagttgtatgacgccactcagaaccctctgttctacactaactctagtgatatgcctacgaatagttccaatattgaccgacgcacgaccaattccagtgcagagagtaacaatacagaaacagtgcaaaccaatagctcaagtaactcacaacaatccgccaacgggaacaccaatattccaggggcctccggaggttacatggttggtactgaggccgatgctcaatcagacatggctagtgacagcgatgccggaatgaatgacgccaacggcgaaggacgaagcgttgaggttaccaaatcaacgtccacaccagttgctccaaaagacgtgagcatgccctggtacatctggctgggcttcatcgcaggactgatcgccatcgtcatggtcaccataatgctctgttgcatgacctcctgctgtagctgcctgaaaggctgttgcagctgcgggagctgctgcaaattcgacgaagacgatagcgaacctgtgctcaaaggggtgaagttgcattacacatagtga

SEQ ID NO: 16686 - DNA, 1392 bp, synthetic construct; identical to SEQ ID NO: 16673
  source 1..1392: mol_type = other DNA

SEQ ID NO: 16687 - DNA, 102 bp, synthetic construct
  source 1..102: mol_type = other DNA
atgttcgtgttcctcgtgctcctgcccctcgtctccagccagtgcgtgtacctcatgacactccccctggacggactcgggcaccccttccccctgccatga

SEQ ID NO: 16688 - DNA, 1206 bp, synthetic construct; identical to SEQ ID NO: 16675
  source 1..1206: mol_type = other DNA

SEQ ID NO: 16689 - DNA, 207 bp, synthetic construct
  source 1..207: mol_type = other DNA
tctggagacccagatggattagaaaaatcagcagaagatgcaaacgttggcgaagatgttgaagctccagtaatggaagctccattcccagactatacctatgagcctttagaaaaaataggtgaaatcggcgtattgattctaggcgcgctgataacacttattgttgcatggggtataggttatgcattgaaaagatctgaataa

SEQ ID NO: 16690 - DNA, 531 bp, synthetic construct
  source 1..531: mol_type = other DNA
tttaataatactgtaaacatctatcttgatggggaaaatgtaagtgttgaaacacaaacttttgaagatatcgattctaacagtttaaacaaagatatctgtagttatacattaaatgttatgaataatacaacatccgatgtggaaactttaaaaaatggagtagaaaagctttgttatcaacatggtcttgaagatgctgaaataaacattgattcaagtttaggacatgatcagatcccaattattgtccatgttgacggaacatcaatgcttccaacattacaaaacggacaaacagttttagtaaataaaactcatgattttgaagttggtgatattgttgttgcagaatctaaggaatatggtggaattattaaaagggttgaaaaaattgatgaaaataaagttcatttaataagtgacaacaaaaatatttcatatgagtatattgatggagcactatatcaaatcaaaggtataacaacatgggtagatatttctgatgtcaacggtgtggttattgattat

SEQ ID NO: 16691 - DNA, 654 bp, synthetic construct
  source 1..654: mol_type = other DNA
gctgacccattaactgataatcaacttaatccaactattttttatcttgattttaatcatggcgctttaaatgatggttttaaaaaagaatttgatctctttgagtatgttccaacatttgatagcgtagacctttacaacgatggagaaaatgtctctgtaagcttttatagtttaaatcctaccattgatgtggataacttaaatgatgagattatagattatacatttgaggttatggaagatcctaaagccaatataactacattaaaggatggaataaggaacatatgctctgagtatggtgcagatgatgtcaagattaatgtggattctgtaattggagaggatgaaattccagttatttttacaactgaaggagattccatgcttcctaccataaaaagtggagataaggtcttggtgaataagagtcataatattcacgttggaaaccttgtttcagcaaactcttcagagtatggccctatctgtaaaagggttgctgatatagatggagattcagtttatcttgtcagtgacaataagaaggttactcgcgagtattatgatgattattatgtggaatataagggaatcactacatgggttaatattgatgatattgatggtgtgattattgacattatgaat

SEQ ID NO: 16692 - DNA, 723 bp, synthetic construct
  source 1..723: mol_type = other DNA
tcagtaggtacttcaaatggagacctaaatggccaagatgttcaattagctgctgcagctagtttgaaaaatgtttatgatgaaaaattaatccctatgtttgaagaaaaatatcctggtgtaaaagttactcctacttatgcttcaagtggggatttacaaaaacaaattgaaaatggtttaaaagctgatgtgttcatgtctgctggcaataaacagatggatgctttaatcaatgaaagttatgttgataatgattccaatgttaaatttttagaaaacaagcttgttttaatcgtatctgctgattcaaatgtgaatatctcttcatttgaagatttaaaaaatgtaaatggcactattgctattggtgatcctgaatctgtacctgccggacaatatgctaatgaatcattacataatcttggtatttgggatgatgttgaatctaaattatctttgggaactgatgtaacagcagtattaaatcaagtagctcaaggatctgctgattgtggtcttgtatacactactgatgctaaatctagtgatgaggttaaagtaatttgtgaagctcctgaagattctttaaaagatattgtttatcctgtagctccaattaaagattctgaacatgctgatgctgcaaacaaatttatggagttcttacaaactcctgaagctcaaagtgtatttgaagactacggatttacaattcatgaa

SEQ ID NO: 16693 - DNA, 756 bp, synthetic construct
  source 1..756: mol_type = other DNA
tgctctgcaggtttccttgactttttaggaggagacaacgctactgacgacagtttaaatggaaaagaagttaatttagctgcagcagcaagtctaaaaaatgtatatgatgatgaattgattccaatgtttgaagcaaaatatcctggagtaaaagtaactccaacttacgcttcaagtggtgacttacaaactcaaattgaaaacggtttagaaacagacgtattcatgtctgcttccaacaaacaaatgaacgctttagctgatgaaggtttaatcgacaatgacaccaaccttcaattcttagaaaataaagttgttttaatcgtacctaaagattcagacttaaacatcacatcattcgatgacttaaaagatgtgaaaggtaccattgctattggtgacccagaatctgtacctgcaggacaatatgctaaagaagcattaaccaacctcggtatttgggacgctgttgaatctaaattctctttaggaactgatgtaactgctgtattgaaccaagtagctcaaggatctgctgaatgtggtattgtatatgctactgacgctaaatccaatgatgatgtaaaagtggtttgtgaagctcctgaaaactctttaaacacttcagttatttatcctgtagctatgattaaagacgctaaagatgcagatgcagcaaaagcattccttgaattcttacaaacccaagaagctaaagacaaatttgttgaatacggatttaccattcacgaa

SEQ ID NO: 16694 - DNA, 783 bp, synthetic construct
  source 1..783: mol_type = other DNA
aatgatctctctgattctaatgtttcaagtgatttaactgttgattcagactctataagctctgatgatacaggatctagcgatacaagttcagatgattcaaatcaggatgatgtatctcaggataagactaatgataaaaaactgtctgattcccagtcagattcatcaaaagatactcaagatactgatgataataatacagataatggttctgataaatgtaatttgattatcacaaaaaagggcaatgagaaagtcaaagttggagatactgtagagtggacaatagaggtaaaaaactctttaaacactgcagaaaacatctctgttgatgagttcctccctcaaaactttgagtttaagtctgctaaggcaagcaaaggaaactatgcagttgagatagcaaattgggacattggaaatttaaaggaaaatgaatctgctaccttagtgattaaggctcaagcattaaaggctggaaatttcaccaatgtggcaaatctcactacagattccgataatatcaatggaaaggtccttagcgctaaggcagatgtggaagtgctttccgagaataaaaagaatgagactcctgtaggacctaagaagaacaaagataataattctacagtcaaaaagattcataaattaattaaaaatcagacaaataatacaaatatgactccaatagattttaagaaatctggaaattcattgtttgctgttataatagctgctttggctgttcttggaatatttttaggacgaagaagaataaat

SEQ ID NO: 16695 - DNA, 1026 bp, synthetic construct
  source 1..1026: mol_type = other DNA
tcaccatcatctatttctacagatgggaataccacaataactgatatggcaaataggactgtaaatatttcaagtagtgttgatagggtggttgctacaagtccacctatgaccactatcgtttatatgctggcacctgaaaaattggttggtgtaaacttccaatggactgatgaggaactaaaatatgttccggatcagtataaggataaattcccagttatcggtggatggtttggaagtcaagacggtaattatgaagagtttattgcttctgagcctaatttggttattgaaggtattgatgaaggaatgggtgttgacctatcaactgttgaagaaagacaggagaagtttggttcacttcctgtagtggctgtaactgacaatacaaatgttacaaagatagacaatacgatagagttcttaggcaagcttttaggtgctgaagataaggcaaatgagttaattgcttttaatgataagtatttgtctcaagttcaatccactgcaagcagcattccagattctgagaaaaaatctgtttattatgcttctggtgaggatggattatccacttatgcaagtggcgcttcacatggtcaattgatttctcttgttggaggcaaaaacgtagcagacactgaagttaaggatagcggaagtgaattgactgtttccattgaacaggtaatgtcttggaatcctgatgttattatagccacagatgaggacttttataataaggtttataatgattccaaatgggctagcgtaaaggcagttaaggaccatagagtatatctttctccacagtctccatttaagtggtttgataggccaccaggtgctaatataattataggagttccttggactgctaaggttatttatccagataaatattccaatatagatatggttggagctactaaagagttttatagcaatttctatcattatggcttaagtgatgaacaggctaaagagattctaacttcttctggtctaaaggggtctgatttg

SEQ ID NO: 16696 - DNA, 1029 bp, synthetic construct
  source 1..1029: mol_type = other DNA
ttgactccttctagtgtggaaacagaaggctctaaaaatataactgacatgttaaatagaactgttgaagttccaaatggggttaataatgttatagctacttctccgccaatgactactgtattatatatgctttcacctgaaaagttaaaagcagttaacttccaatggactgaagatgaattgaaatatgtgccatctgaatatgccaatttaccagttgttggtggttggtatggtacacaagatgggagctatgaagaatttattgctgctgaacccgatattgtgattgaatctattgatgaagggggggatggtgatgcattcactgttcaggaacgtcaagataaatttggcaaaattccagttcttgccgttaaagacactacaaatgttgaaaaaataggagattccatttcattcatgggtgaagttataggtacggaagacaaagctaatcaacttaatgagtttaatactaaatatttggatattgtacatgataaatcatctaaattagtggatagtaataaaaaaacagtttattatgcagcgagtagtgatggtttacaaacttacccgtcaggtgcttctcatggtcaattgattgatttgattggggggaaaaatgttgctgattcattaaatcaaggtaatactacttcaggtgtacaagtatccattgaacaggtaattaagttggatccggatgttataataactaatgatatgcatttctataataaagtgtataatgattcaagttgggctcatttgaaagctgttaaaaataaaaaggtttatgtatctccacaatctccatttaaatggtttgataaacctgttggtgctaatatgattattggtgttccatggactgctaaagtaatctatcctgaagattataaagatattaatatggtggatgtaactaaagagttctatagtaatttctatcattttgatttaaatgataatcaggcaaaagagattttacttgattcaggacttaaagaatcaaattta

SEQ ID NO: 16697 - DNA, 1056 bp, synthetic construct
  source 1..1056: mol_type = other DNA
agtgaaaatatagttattgatgagtcttctgattccaatttagttatagaccatgctaaggataattatttattcaatggacctataaaagataattatttatctagcagttctattagtgataattatttatctaaaggtgttcttgatgattcttatttatcaagaagcgatttggatgattcttatttatctatggatgatggcaaaggctctatcgatttgacgaatcataatcaactatctaattcagatgataaacagcttaaaacttctaatttagaggatgaaaaacagcttgaaagtgtaaataaaggagataagcttcttaaagattcaaatgacaatgtcgatttgtttattaatatggatgtaaagacatcattgaccaacaagcaatataaccgtgcaggaagcgaagttccatggattataactgtttcctctctcaatggaaccagctataatacccaagttcgtgacgttttatctgaaaatttacagtatttatcacataatgctacaatgggaacattcgatccggaaaatggaatttggactgttggtgacttggaatcttctaaaaatgcaagcttgacaatattgacaagattgaaaagagatggtacatatataaacaaggcttatgctactaccgattcaaatgatgttaatctattgaataacttcctaatcatttccataaggaccggttcatcaaagatcacttctaacattacagagacaagtgatgaaagagagggaattcagcataatgttcattatgctagtatggttgatacggactttatatatagatatgaagaggactcttcagaagacgatggcggcaatgaagaaggccaatctgaaggaaattcccataccaagactagatctttaggaaataaattgaaattattcaatgctcagaatatagattatcattctctttccaaaaacatcggtggagcattaggttttggatataattcaaatggaggattccttaattcaaaggacatttatgaggctttatttgtttatgactataca

SEQ ID NO: 16698 - DNA, 1539 bp, synthetic construct
  source 1..1539: mol_type = other DNA
ggaggaggcactactgaaagaggtcctggagaaatcgtagttgcagcttacagtcacggaggagaaccagaagctggtttcgatccaattgcaggttggaactattatgctgagccactcattcaaagtaccttattgaaaatgacccctaacggtacttacgcaaaagatttggctacagactatgagattagcgatgattataagacatacactgtagacttaagaaaagatgtcaaattcactgacggttctgacttgactgctgaagatgtagcattcacatacaacgcagctaaagaatctggcgcaagcttagacttatccgctttagataaggctgaagctcaaggtgattacaaagtcaaattcaccttaaacaaatcagattccactttcttagataagatggcttacattggtattgttccttccgattcttataacaacgaatcatatggtgaaaacccaatcggttctggaccatacaaattcgtacaatgggacaaaggtcaacaagttatcttagagaaaaaccctgattactatggtaaacaacctgaaatcgaaaagataaccattctctttgctcaaaacgaagctgcgttcaacttagctaaaaacggagaagctgatatcgtagctgtacctctcgaatatggtaaagaaaaacttgacggttacacaatgtacttacaagacaccatcgacgttcgtggtgtatctttacctagtgtacctgataccggagaattatctccagatgacaactacacaatcggtaacaatgtaacctgcgatattgcaatcagaaaagcattgaactatggtattaacagaactgctttagctgaaggagcattaaacggattaggttatccttcctatgacggtattgctcaccaattaccatgggctaacaaagaagcagcaattgaagacggtgacgttgcatacgcaaacaaaaccttagaagaagctggttgggttgactctgacggagatggaatcagagagaaaaacggaaccaaagcttcatttaagatctactactctgcaagtgcacctgaaagacaagctttagctgtcggtgctgctgaacaagctaaacaattcggtattgaaatcgaacctgtaggtgctgaatgggacgaaatctatcctaacgaattctcacaaggagttctctggggatacggttccacagatccatctgacatgtatggagaatactacagttcctctgacttcaaccctgcaagagtaaacaacagtgctgttgacaaacacatggatgacgcatttgctgaatcccgtgaagactcttacaaagattggtctgcagtatcctgggacggttctaccggtatttcccctaaaggtgacgcaaactggttatggttaggtgaaatcaaatatggttacttcgtaaacgacagagtggacatttccaatgacaccgctctcttacaacctcacggaggagacttattcagtaacgtatatgattggaccatgactaacgctactgcagaaaaa

SEQ ID NO: 16699 - DNA, 1542 bp, synthetic construct
  source 1..1542: mol_type = other DNA
ggctcatctactgaacgagcagacaatgagcttatagtggcggcttacagtcatggtggagaaccagaagctggttttgatccaatacttggatggaactactactcagaacccttaatccagtccactttgttaaaaatgacaagaggaatgaaatatgaaaatgatttagctaaaagctgggaagcaaatagtgattttacagaatatacagtaaaaatcagggacgatgttaaattcacagacaacactactttagatgcagaagatgtagcattcacatacaacgaagctaaaaaaagtggagcaagcttagatttaagtagtatggaaaatgcaactgcagtagacaaacaaactattaaatttgaattaaacagaccagattccactttcgtagataaatttgcatacattggtattgtgccatctgattcatacaacaatgaaacctatggtgcaaatccaataggatccggaccatttaaattcgtacaatgggacaaaggccaacaagtaatcttagagaaaaacccagattactatggaaaagagataaaattcgataaattaacaattttattcgaacaaaatgaagctgcattcaatgctgctaaaaataaagaagtagatatagctgcagtaccattgtcttatgcaaatgaaactgtagatggatacaatatgcacctcatggacaccatcgatgtaagaggactttcattaccagtacagaacaataccggtaaattaagcgaagatggaaatccaataggcaacaacattactgcagacaaatcaataagagaagctttaaattatggtgttaatagaaccgcaatatgtaaaggagcattaaacggcataggagtgccaaactacgatggtatcgctcatttattgccatgggcaaataatgaatctgcaattgatgacggtgatgttgataaagctaaagacatcttggaaaaaggcggatggaaagatactgatggcgatggaatagtggaaaaagatggtaagaaagcatcaataaatgtatattactcatcaaatgcacctgaaagacaagctattgcagttactattgctgaagaagccaaagaatttggtattgaagttaatgcaactggttcaaactgggatgaaatggacaaaattaaaaatactgacccagtcgtatggggattcggttcaactgacccgtcaacaatgtggtctgaatactacagtgatcaagcaactgtcggatataataatccagcacttattaacaatagtgctgtagataagcatattgataatgctatgaaatctgatcgcgaatcatcatatgcagaatggtctgctgtatcctgggatggtcaaactggtatttcacctaaaggtgatgcagcatggttatgggttggagaaattaaatacggatatttcgtagatgaaagtttagacatatcaaacaatactgaacttatacaacctcacggaggagatattttcggaaacatatatgattggtcacgtgtatcttcaattgaaaaa

SEQ ID NO: 16700 - DNA, 1545 bp, synthetic construct
  source 1..1545: mol_type = other DNA
gcagacattatagcagacaatcaagattcaatttcatccaatgacaattcaatcaatgaaattgctacagaagacattagcaaagacattaatgacaaatctctttcagatggagtcagcaccggcggaaacaattggattgtaaaaccatcaacagatggaaaaagcgatgcaaattccattcaaaaggcaataaacctcgataatacaaagcctggagacagtctccttttaactgataagaacttcaccttagaaaagtcagttagcttgaataaagaccttacaatcaatgggggaaatatatacaatcagaacaatttaactgatctatttataatagatcctaaatctgaaggaggtccaaagaatataacaattaccaatgttacattttatgtaaatggaaatgaaaacattgtgcttgcaaatggagagaattacggcacaacttatattgatcttgccaatataaaaataagcaactgtacaatcttgcctataaatccagacagcaatatcaatgatacagtgcttcttaatataaaatccgataggacagtaggccaaacaggtcaaagtacaggattcgtattggtttcaggcaacaagctaaacggcataaacacccttaagaataacgattacgtattaaaagacgactttgttattcaaaaggcggaccctatcttaaataccgccctaatatgccctaacatgactattacaacctatgataaaaacactaatgacactccaagctattatgaagtgaaattgatagatcaaaatgtcaatcctgtaatcaacaggacaattcagataggattcaatggcaaaatctatgataggacaagcgatgaaaatggaatagcaaaggtaaaattaaccttagcttacacttcagtttacacatttgcagtttacttcctaggtgatgaaagctatgcaagtgcatttgacgtttcaactgtgacaatcattaagaaaaatgccacaatcactccaaagacagttagctataacgtaaatgcaaaaacaaaaactttaactgctaccttaaaagacaaaaacaataaggctttagccaataagaaggtcactttcactgtaaatggaaaaacatacactgcaacaacaaactcaaaaggtgttgcaagcgctaagataagcctaagcaagaaaggcacatacactttcactgcccaagttttgcaggggacaatatctataattcagtttccaaaaaagggaaagcttaccttaaatccgctttcaacaaacttgactgtcaagaagtacacattcaaaaaagcagccactaagaaaatacaagtcactctcaaatccggcaagactgtgcttaagtccaaaaagcttaccataaaagttaatggaaaaacatactccggaaaaacaaacacaaaaggaatcgctacaattaccataaaattaactaaaaaaggaacctacacttacacagctaattttgcaggagacaatacttataaggctattagcaaatctcaaaaagtggttataaaa

SEQ ID NO: 16701 - DNA, 1560 bp, synthetic construct
  source 1..1560: mol_type = other DNA
tttatgagtggaggaaataccagtacaagagcagataatgaattagtagtttctgcttttgtacatggcagtgaaccagaaacaggttacgacccgatgtatggttggggagaccgtggagaaccattaattcaatcaactttgatgaaaatgaatagaaatatgacctatgacaatgatttagctacaagttggtcttctaataataactttactgaatatactgtaaatatcagagatggagttaaattttctgacaacacaacattagatgctgaagatgtagcattttcatataatcaagcaaaaagtactggaaatacaattgatttaagtagtttagataatgcaagtgcagttaataaaactactattaaattcaagttaaataaaccagattcaacatttacagacaaactgttacatgtaggtatcgtaccttcagattcatatgacaataatacttatggaagtaacccaataggatctggaccattcaaacttgcacaatgggataaaggtcaacaagtaatctttgagaaaaatccaaactattatggaaaacaaccaaaatttgataaattgacaatatcattccaaaaaaatgaagcttcatttaatgcagctaaaaatcatgaattagatattgcagcagtaccattatcttacgcaaatgaaacaatagatggttaccactcatttttatccgaatcaaatgatgtgagaggcatttcattaccaatgaaaaacaatactggtgaaactaatgaagatggcatagcattaggaaataatgtgactgcagataaatcaatcaggttagcattaaactatggtattaacagagaagacatatgtaaaggtgcattaaacggtgccggcgtacctaactacgatggtatcgctcatttcttaccatggtacaataatgattccactatcaaagatgcagatattgacaaagctaaagatttcttgaagaaaggtggatggaaagatacagatggtgatggaatagtagaaaaagatggtaagaaagcatcatttaacctatactactcatcagatgcaccggaaagacaagcaattgcagtagcagtttcagaacaagcaaaagaatttggtattgaaataaatgcaacaggttctaattgggatgaaatagataaaatcaaatttagtgaaccagttgtatggggattcggttctactgatccttatgtaatgtacggagaatactatagtaatcaagcaggtattggatacaacaacccatcacttgtaaataacagtgctgtagattcacatattgataaagcaatgtctgaaccacgtgaacaatcatatgctgactggtctgcagtttcatgggatggtcaaacaggcatttcaccaaaaggtgatgcagcatggttatggataagcgaaatcaaatacacatactttgtagatgatagtttagatatttccaaagatacattcaaattacaacctcatggtggagacttattcggaaacatctacgattggactcgtatatctccaattaatgctacaaat

SEQ ID NO: 16702 - DNA, 1560 bp, synthetic construct
  source 1..1560: mol_type = other DNA
tctatgttaggaacatcaaatgatgatgatcctaggcatattgttgtaactattccaggtcaaactggagagcctgaagctggatttaatccattaaatgggtgggggtgtggacacatggaatttaatcctttagttcaaagcacacttttaaaatctgataaggatggtaattttgtaaatgacttagcaactggatataatataagttctgatgggcttaaatggactgttggtataagggatgatgttaagttttcaaataataaatctttaactgcaaaagatgtagcttttacatttaatgaggcaaaatctagtaattcacaattagacatgtctaatttaaaagaagctaaagctttagataatactacagtggaattcacattaaattcaccaaaatctacttttaattatgatttaagatatgtgggtattgtttctaaagaagattataataatgaaacttatggtcaacaacctattggttctggtccttatgtgttaaaacaatgggataaaggtcaacaagctatttttgaaataaatgataattattatggggataaaccatatttcacacaaataacaatgctattcccaaaagaggatagtgcagcaatgcaaattgcaaaatctggtcaagctgatgttgttcaagtaccaatttcaggtttaaatgaaactgttgaagggtatgagttagttgaattctttagtccacgtgctcaagggattactttaccctatcaaaatgctactggtgaaaaaactactggtggaaatgatgtaggtaacaatgtaactggtgatgttgcaataaggcaagctttaaatgttggaattaatcgtgaagagattgttgattctgtttataaggggcatgctttagttgagactagtggtatagaccatcaaaaatataataatcctaatgctattataaaagataataatcctaaagcagctaaaaaaatattagatgatgctggttgggttgatgctgatggtgatggaatacgtgagaaaaatggaactcctgcaacattcacattactttatagttctgatgatcaagcaagacaagctattgcaacagttgtatctgaacaagctaaagatttaggtattaatattgagttggaaggaactgattgggatacaatatattctaggatgtataaagatcctgcagtattccaacagtcttcagataatccttataaaactacttatttacaatatcatagtaaggataatttaagtgaagataattatatgaacccaaatggttatgaaaattctaaagttgatgctatattggatgcggcattacgtgaaacagatttaaatgcatcatataaattgtggggtgatgcagctaatactgggtcaggttatggatttggacctaatgaggatgcttcatggttatggattgcagattttgattactgttattttgtaaagaaagatattgatatgggtacaaaaccaactatgggtcaagattatatgcaaaatatttgtgaatggaagcacactagcacaactgaa

SEQ ID NO: 16703 - DNA, 1617 bp, synthetic construct
  source 1..1617: mol_type = other DNA
atggataagaaaacaatcattatagctgcagtagctattctcgttattgctggaattgccgttttcgcatttggaggcggcggaagcagcgatagcgatccgacccacttgacagtagctacacacagcaatatggcagaacctgaagcaggtttcaacccgcttacaggttggggttgcggacacatgaactataacccattggtacaaagctgtctctttaagacagacaagaatggagacatagttccagaccttgcaaccaactattcaattagtgctgacggtttaaaatggactgtaaaggttagagatgacgtcaaattctcagataactccacttttgacgcaaaagacgtagcatttacattcaacactgcaaaagacactgaaactgatttagatttaaccaatcttaagaaagttacagctaaggatgacaagactgtcgtatttgaattggaagaaccaagatccacattcatctatgacttaaggtatgtaggtatcgtacctgaagagtatgacaacgctacctacggcgaacacccaatcggtaccggaccttatgtattggaccactgggataaaggtcaacaagctatctttaaggcaaatgacaactggtatggtgacaaaccttacttcactcaaatcaccatgttattccctgaagaagctacctggctagagttagctaaatccggtcaagttgacattgctcctgttgcaacctctgcacttaacgaatctgtagacggatacaactttgttgaaaagtctgcaggtagggcacaaggtatctccttgccatatcttgaagatactggaaaaaccagcccagcaggtgcaaagatcggtaacaatgtaactgctgacaagtccatcagagaagcattgaacataggtgtcaaccgtgataaaatctgtgaagaagtattctctggtcacgcttcacctgaatataccagcgtagataccagaagctttgcaaaccctaacgctaaagtaaaagatggtgatgtagcaaaagctaaacaaatcctcaaagaaggaggatgggaagacacagacggtgacggaatcgttgaaaaagatggcgtaaaagcatcctttgacttatactacccacctgattaccttgacagacaatctttagcaacagtatttgctgaacaagctaaagacttaggcattcaagtaaacctccaaggtgctgactgggataccatctatgctaacatgtattcctctgcttctgtaatgcaacagacctcaccggacccatataaatccatctatcaacaatatcactctaaggaagctgatgacttctatatgaaccctaacttatataacaatactgcttccgatatgttgatggaacaagcaatgcactccaatgacttcaaactagcagactccttatgggctcaatctgcccttgtaaacggcggaggctggggacctgctggagatgctccatgggtatggcttgctaactacaactacaactacttcgtaaaagaagatattgatatgggtgaccaacctgacggtttaggaaatgacttcttgattaatgttgttgattggactagaaccaattcaactgca

SEQ ID NO: 16704 - DNA, 1914 bp, synthetic construct
  source 1..1914: mol_type = other DNA
aatgatttagattcaaattcagtcaatcaagacaattatatttctgatgtagattcttttgatggttctaattcggttttgtccagttctaatttggatagttctattgataaggataattatttaaatttagattctaataataatttaaatttagattctgataagaattctgtttcaggttctgatttgaatttaaataatgctgatttaattaattctgtttcaggttctgatttgaatttaaataatgctgatttaattaataattcaactactaatgattcaagcaattcaaataattcaaataatttagaaaatcttactaatttagatgattctaaaggtgcttctaatcaaaagcctcaaaagtatcttattcctaatgacagttctataggttctgcatatatccaaaagatcattgataatgctgcacctggaagtacaattcaatttacaggttccttctataaaaatatttatctgaaaatagataaagctctaaacattataagtaaatctggcactgtgataaattcaagctatcgtttgcctgtatttactatatcaagaggaggatctggaacaaatatttcaggttttacagcaaatcttgcaaattcctttgtagaggcaagtgatgtgtccgatataagcatatcaaaaaataaaatctttacaaaacggaaagctattgtcctcgaaaatgtttttaattcaaagattgtaaggaatagtttcctaagatttgaaactgccattgacatttcaaaatctggcggattgaccatatccaataataatataactccagataacggatacaatgtgggaattagcttaaaagacatttatagagacaaggttagcatattaaacaataatatcactggccatgacagacgtatagaatccacaggcatttacttcgggccaaacgctaagaatgtattgattgaaggaaatattatagatgaatggtatactggtgtagatttccctaattctgtaaataatgtttccattttaaacaataccctcaatcacaatggtgatggagtaatcattaacggatggattaataatttcacttttaataagaatgtagtcactaatactggaagagttggagttctatttgactatgatttttatggaacaaaaggggatttcactttagagaagaatttctttacccaaagcggacagttggatttaagaaacactggagaccaggcagtaactattggtgaaaactttgctagcagacgttgtgttagggttgccatgaaaaatggattttccattaaaacccgtcaaaatggaaatggctattatttctcaattgtggataagaattccaggggagtaagcgggcttcctaactttagtgctacaatcagcatcaatggagtttcctataatgtcaatttcataaattctgttgcttatgttgaagttgatggcgctagcggcgaaaatgatgaggtccttcttgatgttggtgaagacaagcgtaagcttagcgattggggagagactcaaaatcttagttccagtgaaatggaatactataaaaagatttatgatgatttgatcaaatctatggtagaagagactaataatgataatcaggacatgaaaaaggtagaagataagaatggaacaggctccactccaagtggtggaaacggcggaggcgactctggtatttcagacggtcgttcttctgtaagttcaaatggagattcctctcctgcaagtgcaggaacttctaatgtggcagcaagttctgcatcttcatctgcgggcccttctgcagctcaagcagacactcctgaaagttctactgtaaaatcattgtcacttgatgaggaaacctttagagttgctggtgttggtggattagtc

SEQ ID NO: 16705 - DNA, 1986 bp, synthetic construct
  source 1..1986: mol_type = other DNA
gcagatgctgatgtcacatatataaacgatgctgcagatgtagacgatgttgcagacgaaaaagttgctcctcttacagctagtgctgatgcacaagacatccaaactaagcttgataatgctaaacctggagacacaattgaattagaaaacaagacatatgacgttgatacaacatttaatgtaactaaacaagttaccatcaaaggtcaagacactgtcattaaagctagcggtgcatcccaaggtggtagcggagcactcttcattgcaaatgaagctggaactgcttttgaaggaattaccttcattaacactgacggccacaaaaactatggagaacaagtatcaggatatgctatccaattagctattgaaaacggtactgtagacaactgtaaattcatcgactggagtagcggtgtatacggtaaaggcgcatctttctgtagcattaccaactcttacttcaacggttcatccgaacaagtaaccaacggcggtaaaaaagaatacggtactaaagcaattaaccttatgggttcccacgacattaccgtaaccggatgtacctttgaaggacaagttcttgacgctatttccattgcaagtaactcaggtaacaacatcatgaccgacaacactttcatcgacaactgttatgctatctacttcggtggagcttccacccaaggatgtgtaatcgctaacaacagtttcatcagatgcggatactgtgttgatgacaaaggaaacgtaatctttaaagatttacctataatcagtactcaaaaagcagctaacggatacatcattgctgataacactattgaagcaaatgaaggatctatctttatgaaagctgaatcaggtaacacagcacacggatacccaagtaagatcggtgacataaacattacaggcaacaccattaccgcaactgcaggggctaatcctgaaggcattactttcatgtacatcttaagtaactctggtcctttaaacccatatgcacctattgcaatcgttaacaacaacttagacgcaggcattacccctgtaaccgtatggtatgctgactgggacaatgaaaatggtactgtaattcctgcagcagataaagcagtaacctccatcaacattgcagaaatcgctgcagcagatggaaccgtcactgttgaattggtagacgtaaacggcgctcctcaagcaggacaaaccctttcctacaaaatcgacgatggaaatgcaactgaaatcgaaactgatgaaaacggtaaggctgtaatcaatgtaccaattgatgaaaacgctactgcccaaactgttgccgttgaatttgccggaactaacgaccttgctgcaagcagcgctcaagtttcattcaaaaacactgcaactaaaagaacagctacccaaatcaatgctaacaatatgtcagttgtcactttagcacctaataccggtgacacaaatgacaattacttcaacgcaaccttacttgatgcagaaggcaatcctttagtaaacaaagaagtcaaaattggatttaacggtaaagaatacactaaaaccacaaatgaaaatggtgtagctcaacttaaaattaatttaggatacaaaggaggatacacctttgctgtagcattcctcggtgacgatgaatatgaagcatcatttggagtatacttaattaacgtagccgctcaaactcctaaattaactaccaaagctgctacttacaaagcatccgctaaaaccaaatccattagcgctaccttcaaaaccgaacaaggcagtgtaatcgctaataagaagatcagtttcactgtaaacggcaaaacttacactggaactaccaactctaaaggtgtagctactgttaaagtaagtatcaataagaaaggaacttacagcttcactgctaaatatgcaggtgacaacacctacaaagcagtaagtgcaagtgctaaacttactataaaa

SEQ ID NO: 16706 - DNA, 2067 bp, synthetic construct
  source 1..2067: mol_type = other DNA
ttgtcaaacagtaatacagatagctctgataatgcatcagatgatgcttcaggatctgaaatagtatcaggaattaacgaagagcttgaatcaaataatttattaactgaagatttaagcgtagacgatgtaattttacaaactagcttttatacaagttatgcagttaaatctgcaaaatctcctactgtattaactttcaaaaactctacagtggtaaaaggagataaattatacatttacttaaaagacagttccaatcatggcatttccggcgaaaaggtaatatttaaattttcaaattcatcttatacaagaactaccgattcaaatggaatggccgcacttgacattaaacttaatccaaacaaatatgctttttcagcaatatatgatggcagcgataattatagcgcttccagaaaagactttactttaactgttgctaaagtcaatacaaaattgacttcaagctcaagtgttgtaaggggaagaaacctatacacttatttaaaggataaaaacaacaatgccctttcaaataagaagataagcattaccatctctggaaaaacatataccgttactacagacaaaaatggcagagcaagcctaaaattaagtttaaagacaggaacttactcaacaaaaatcaattttgctggagataaaacatataactcccagtctttatccaaaaagataaaaatatataccttaaagacagtcatgacaattccaagtacttcagttgtcagaggtcaatatatttatgcatatctaaaagacagtgacggaaatgcactctcagggcaaaaagtggtaatgaaattcgacaaaatctactttaacctaaaaacagacaaaaacggaagagtagccctgaaaataaatacaagacttggaaaaatcccagtaaaagcaagcttcgcaggatcaacatcctactcagcaagctcaaaatcagtcactattacctcttatgttgaaaaaaccaagattacagttgaaaattcaacagtgaaaagaggaaaatatttctatgcatatctaaaagacagcaaagataaaggaatttcaaaccaaaaggttaaaattactttagctaatataaattatacaaaaactacagactccaatggtaaagtcgcattgaagatagaggaaaatcctggaaactacacaataaaactcaactttgctaagacaaacagttactatgcaagcagcaaatcattaaagattaatgtcttgaataatgcaactgctaaaatcatagcaaaagatcaaaccgttcttggagaatactctgtcagattaaccgacatgaacagtaatccattggcaaatcagacagttgagattactgcagctacagtaaatcgtagtgtaggatctggattgcctattactaaaaagactgttgttatcaattctgataacatctataacaaagcaacagactcgcaatttattaaatccattggagaagtccttaaatccaaaggatataaagtaattatcaattcaaatatcggtccgaatgctcattgtacagatgcaatgggagcttactctgatgtttgtattttctgtatcttcggtggtgtggacagtggtatgtttgttgacatggcagcaagttggtatcagaatctgttgaagaaatacgataatgaagttgtattaggattcactcacactcaaagaaacctagctacagatacatggcttgaaagagctcatgacgatgattacagtcctaaaaacttcactggattgtcatatcctggaacatatctaaatgattatgatatggattatgtatatggaagaacagctacagaaatggctaataatttcattaaatatgctgtaaatggtttaagcattggtttaaacaatactgttccttgcaatgtcatggaatataatgtaactaccggcgataatggttatgcaaccataacagatttattgccaggtgattatgctgtgatttcttcttatataaataagacagcaggatatgttgcagatactgtgattagtataattgaagttaaa

SEQ ID NO: 16707 - DNA, 2328 bp, synthetic construct
  source 1..2328: mol_type = other DNA
agtgaaaattcaatatcaagcgatattaatgataattcattaattaatgaattcacagcatcaaatcaaatcaacgacaatatagcaattaatgatggcttaagcaaaggcgacaaaagccaattatctgaatccaaatcaatatacgtatccacaaacggcagtgacgattcaggagacggaagtgaaaaaagcccataccaaagcataaaacatgcagtatccaaggcagatgatgattcaatcatatacctatccagcggaacttacaatggagagaataaccaaaacataagcataggaaaaagcttaagcatctatggagaagattccactataatcgacggtgaagacaaggcacagctattcatcatgaattccagcgcaaaattaagcttaaacggacttattttaacaaatgcatataaggacggcaacctaagcgactatggaggagccatcataaatgaaggcggacaattgaccataatcaactctacaatcaaaaactcttatggaaactactatggaggagccatctacaacaatttaggaagattgaccatcataaactcaagcattttaaacaatagcgcaatacaatatggaggagccatctatacacttggagtgacaaacatccagaactcagttttcgagaaaaacaccctaacagctgaaaaaggtgtgggagcaagcatagcagcaggaggaacaataaccctcaacaatacagatttcctcaataatcatgcgatatattcagcagcagcgcttctcagcttaggaaacgcaacaatcaacaactgcagtttcataaaccagaccacaaactatacagcaggggcaataagcaatcacggaaacatgtttataaacaacagccttttcttcaattgcagagtaagattctatgcaggagcaatacttgcacctccaagcggacaccatgtcgtaacagaggtctacaatacaatctttgactataacaatgcaggaaaccacggagcagtcacaaacaacttccaagatgcagagattacaatgataaactgtgcaataaccaataactacatccaaaagaacgttttctatggagatattgcattggatgacaacgctacagtccaatactgctggtggggccaaaacaacataagctcttactactattcccctcacagcaataatgaggatccaggtcaaataaacgcttcaagatggcttatgatgactttcacatcaagcaatggaaacatctcagcagatgaagtgaacacattgactgtaagcattaagcaatactttgacaacgatacaaaagaaatatacgaatataatgaggatataaacctaccattaaccgttaaattcttcgacgacaataaaaagaccattgcaacaaaaactttaaagaatggtacagcaagctacaattacatcccagtgaaaggtgtcaatgctgtctatgcacaaatcaccaatgaaatcattgaaattccagttgtccagaaaaaggaatcaaatcttagcacaagcaatctgaccaaatactacaaaaatgaaagccaattggaagcaaaactgacagatggcgacaataatcctctttccaataaaactataagcatagaacttttaggaaaaacatacaataagacaacaaacgaaaacggaatcgttaaacagaatatcggattaaagccaggccaatacactgcaaacattattttcaaggacccagaatacaaaaacaaaaacattacagtgcaaatcactgtcttaaagaacagcacttcaataagcgctaaaaaccttgtaaaatactataagaacagcagccaattaactgtcaaattgcttgacaataataagaaagcaatgaagtccaaaaaagtcaaattcaccattggaaaaaacacttacacaaggacaacaaatgcaaatggagccgctacattcaacatcaatctaaaggtcggcacatataatgtaaaggtttcatttggaggagatgactactacaaaggatcttcaaagacagtcaaggtaactgtaaagacaacaaagatgcaggcaaagtctactaagatacgcaaaaactctaatttcgtagcaacatttaaggacgctaatggaaaggtcataaagaacactaaagtgaaattcactttaaataaaaagacctatacaaaaacaaccaatagcaaaggacaggctacattaaaggtaagtgtaaaattaggcagctatacaattaaaagtcagtacgcatccactaagacctatggggccactgtctttaatacaaaaattaaagttgtaaaa

SEQ ID NO: 16708 - DNA, 2499 bp, synthetic construct
  source 1..2499: mol_type = other DNA
aatgatttaggcactgtattggaggataatgataataacggattaaatgacttaaataatgatgattttataaattcagatgtgaattcagatagtataaataaagaagcaatttctaatttaaaaagtttaaatagtcaggatgaatctacatcttctgattctaataattctgctagttctaattctaatagttccgttgcttctagttctaatagttctgcaagttctaattctgctaattctaatagttctactagttctaattctgctaattctaatagttctgtaagttctaattctactaattctaatagttctgcaagttctaattctactaattctaatagttctgcaagttctaattctactaattctaatgctaacaccaataactccagttcagatgcatctaaaactcaaactataaaattatcctctcaagaggaaagtgcccttaatgagttcttaaatgcaatcaaaacaactactaaaggcacaattgttctaaaaaacgatttggtccttaatcaaactatctcacttaataacaatattacaatagatggtaggaatcattccataagctccttagatgttacaaacatgtttaagacctttgcaaagatcacacttaaaaacattgtctttacaaactatcatgaaatagagaatttaagggcaatacttaactctggagaattgactgtcctcaattgccaattcaatggattttcatatcttacaaacggctcagctatctataacagcaaaaagcttaccgttcaagggactaagtttaataacaattatgtcaataacagcggaggggccatctatagcacaggaaccctgactataaacaattcctcattcaacaaaaatcatgcaggcaaaaatggtggagccatctattccactttaaacctaatcctaaaccagtctgtctttagcaataattccgctaatgaaagcggaggagctctctattcaaaaggcagcggattaaatataaaatattcccgatttaataataactctgcatcattaaatggaggtgcgctctacagctcatccaacagtacggtgatttcctattcaaatttcgtttcaaactttgtggaagcctatgataaagcaagcaatggaggggctgcatttatctattatggatctaaaattgcatattcaaacttcacatctaaccattgtaaaacaactcttacaaacagttctcagaaaaagtcaattcaatcaatgggtggagctttattctattatggtggaaatcatactttaagcttctctaattttaataagaactctgtagaaaacgacggaggtgctgtgcgcatagccaaaaatgtagggaaatttacattgaacaaatgtaatttcacaaataacaacgcatcctatgaggatgggggagcaatttccttagcaaccccaaacatcacaatctcaaactccattttcaagaataactttgcaaatgaggacggaggagctattgacacattcagtctaggaagctataaggtaaatgtattgattaagaattgcctattcaattcaaacactgcattcaaggcagcaggtgcaatatatttaggagtaaacactgtccaatcaatagtaaactctaatttcacatcaaataaggcaaccgttgcaggtgcattctatatagaatccatttcagtaagcattagcaattgcatcttctcatccaataaggcagacaatgtatccaaaaagacaatatataacaagcaaggcaaggttgtctcccattcaggaggggctgtattcgttaagaatggaagtacagtcaccattaaaaacagccttttcaagagcaataaggccacatcaggtggggccataaccaatcatggaaagatggtcattgataagtgcaatttcacaagcaattctgcaacaaatggtggggcattatatggcggtggaaaaacaagcacaataagaaattccatattctataagaattcagcaacaaaaactggaggagcattattcatcaatgaaggcaatgtcaatatgaaatcaagcatgatagtctcaaacactgcaaaatcctattctgtctacagcacagtttcaatcacattaaacaataactggtggggaaacacattgtcaattaaggacaagtcccctaagactttaggattgaccaatgttaaagtgagcacttggcttcatttaaaaataagggctaagaccactaagcttgctaaaggaaagaccacaacattgactattgacttaagatataataataacgataagcttgtttcaactgcatttaacaatcctcttactttgactgtatctgaaggcactttatctagcaagaaagtgaatttaaaaaatggaaaggccacagttaagtttaaaaagaccaattctaagactgcagttgttaaggtcaagctattgggaaaaacagcacgttgtactataaagactaaa

SEQ ID NO: 16709 - DNA, 2742 bp, synthetic construct
  source 1..2742: mol_type = other DNA
gaaaatattatcacagcagatctaaattcaaattctaatgagcttaattcagattttgcttatggtgattcagattctgaagaaatcttagatgaaccctctcaaaagcttaaaacaggttctgataattctgattttaaagacatacaaaatttaatcgataatgctaaggaaaatgatgtaattgagcttagcggaacctatacaggtgattctctaattgtagtaaacaaatcattaacattaaagtcttcttcaagtgcaacacttgatggagaatttctaaatgaattaatggctataaatgctccaaatgttatattggacaacatcaactttataaatgcaaattacactggtcttagtgtaaataacaattatgtaaccattcaaaattgtaattttgacggctgtatcaatggagagttaggatgtgccttaataatccatgggaataatgtaaatgtattaaactctaattttacaaataatgttgcaaataagtccagctgtcatcatacggatggggcagcaatttatcttattggaaacgattgccaaatcgataattgcagttttataaataattggggttataattttgaaacatcctcatcaggaggagccatttggataaagggaaataatattgtaattaacaattcatatttctttaataattcagctaccgctgaagttggatggacattccatggagaggagataacctatttggcagatggatatggcggagcagcctttttagttggaaaaaatgtaaaaataatcaattccctttttgatagtagcctttcccatgcacaagggggagcattgtattataagtctgcatatgattgttcaataatcaattcaacctttttaaattcattttctgttggagagggaggcgtaatctatttaggtcagaatattgatgggctaatgatagattcttgtaattttataaacaacactgcagacggattggatggagttttagtcaaatacaccgatttaggcagtgttttatatgcttcaaagttcgctgaaaatgtagtgatcactaattcaagtcttttaaacaataaaggaacctctgcagtctactttttaggaaataacttaaatatttcaaattcaatcatagaaaataataatctatcaactgcagtaatttatatgaatggaagtatgaatgacaatttctggtctaagaactttgattctgcagatgagtttaagaatgattgcttcattattcgagataatgagtctcaagttcctgatacttggtttaacttagtttgtgatggcttggatagtttaaaggcgaagggtgtatatgattataatatgtcctttgtcttaaaggatgcttctttagataatcatgcctcaaaaatttcattaacaaataatcttcctaattatcatattaacttaaaaaacagtgcaaagaataagattaatccaaatgaacttgtgattgttgacaatcaggcagacttcacttatgattatattgagtctgctaaggattccattgatgtttatgatgattataataacttgatcttatcaaagaaggttttatctggaataacttatattaatgatagtggaaatgatacaaaagaccttcaggatgcaattgatagtgccagttctggttctttaatctcattatccaataagacttatgttcttgatacaatattaataaataaggatattcacatatctggagaagaaaatacaactgtcatgctttcaaatagttcagattatatatttaaaatctctaattgttctgctgcaaactattctgattatggcatagccatttcaaacattaattttattttagataatggagatattgttgccttagctgaagctgtaaatgggtctggctcattatctattgatgttgcttcaataaagataacagacaactcatttacatctcgtgaaggtgtagtgagggaatcaattactattcttgagcttgatagccaaagggctgtcttagcacctacaagaaatatttctatttctaataattccttggaaattggaatgaatccatttgattttaatgtaaagtctgtcataaatggctctgatgttagagtggatgtagggggcaatttagccagcaaaaaagccagtcagatcatttgtaaagatatggtcactaaagccattgcaagcaatgtagattcccgctctggagaatactttaatgtaagcttaaaggatagccaaggcaaaccattgcaaaataagtttgttcagataggttttaatggtgctgtttataatagaaccactaatgaaagcggagaacttagattacagataaatcttgcttataaaggagtttatacatttgccatatcctatttgggtgatgatgagtgcaacggttcatttgaagttgctaagataactgtaaatcctcaaagtcctattttaatggccaataatgcaaaatataaggtatcatctactaaaaccctttctgctagttttaaatcaatgaaaggaagtcctatttctggcaagacaatcaaattcactgtagatggcaagacttatagtggaaagactaattctaatggtattgctagtgtgaaagttagtttaaataagaagggaacttataaattcactgccaagtttgcaggagataatacttttgcagcggtgactaagtctgctaaggtggttattagt

SEQ ID NO: 16710 - DNA, 2769 bp, synthetic construct
  source 1..2769: mol_type = other DNA
gatatctccacaattccaaatgatgaaaaggtttctatcaatgaaaatgactatgatacaaattattatgagttacctgataaaaaattagatcatttagaatcaaatgataatcaaaatcatttagaaatgaatgataaaaaactaaatgatggaaactcaaataatgattttaactatatacaagagttgatcaatagtcataaagatggagattcaatattcttagaagacaaaacatatataggcaatggaagtccaattatcataaataaaaacctaaatatttatggatatggctataaaaatttatccgatcttgacataaaaacaatactggacggaaactccaaatcaaacatatttatcattaataagggaattcaattaaatctttatggattaagccttatcaatggaaatacaagttatgaggatggaggagccatctataacaatggactattgagtatagatagctgttcaatttcaaacaataatgctggcggaggagcagtatactcctctgaaggctcagaaattgaaatatacaacagtctctttgaaaacaatagcggacttcttggaggagccttggatttggaaaatgcaaatgcaataatatccaagtccacattcaaaggcaacagatgcaatggagacggaggagccatttacaataatattggaaagctaactatctctaattccaccttttcctttaacaagggagctcgtggcggtgttatctacaataatcatggaaccctatcaatatacgattgtgagatgttcttaaactctgcaagccaattaggaggtactgttaaaaattggggaagctgtgaaatatacaattccacaatcaaaaacaatactgcagacatgtacggaggaggattatacacctttgaatttaagatgactgtaaatgattgcctgatagaaaacaactatgcagatgaaggaggaggcctttttgcagatgcagacagcagattgattgtcatcaattccaccataataaacaacaatgctaaaattggagggggaattgatgcaaagcaagcttatctgactgtaaataactcttccattataaacaacaatgctaaaagcaatggaggaggaatctatgctgacaagcaccctgcagaaatccataacactaatataaaggacaataatggaaattccggaggcggagtcttcataggagacatatcagcaaaaataagtgattccaccttaaatggcaactctggagaaactggaggagcaatattcaataaaggaaaattgattatagaaaaaagcaccctaaactcaaatgaagccaattacggtggagcaatctataatcaaaagaacctaacagtaaacaaatcctcttttgattcaaataaagcctatgaagctgcaggaatctataacttaggagactttttaatagagagctctaactttaccaaacaatctgtaagccacaaagcaggagtcatcttaagcgtaaacggaaacattaagattaaagattccatatttaagcaaacaagcggagcagatgaaggcggagtaatctttacaagagaagggaatatatttatagactcctcactgtttctattgaacaatgccttaagttatggtgctgcaattgataatagcgcaatcatgacaatccaaaactccttattcagcagaaacaaggcatttggtgcaggtgcaattgacaatgggggagatttgactgtcacaaactccactttcacaaacaataaggtcacaaacaacggaggggcgattgacaataatggcaagctttatatgagcggatccgttctagtaaacaataccgctcaaaactacggcggagccattatctctagaaaagatacaaatatagagtattgccaaatattggataattccgctccagagggagatgggctttatgatagcggagattacttattaataagcaataattggtggggagaaaacaatccaaactttgatgaactcttaaacttcaatattgatgaagacttcaaatggattgaaatgaattttaccaattcaaccccccttatgcaaaaaaaggtctctaatttgaccataagccttaatggaaaggataaaaacaacaatagcttcaaattagagaatccagataaattgcctattttaaaatcaagtattcaagtggtaagcgaagacagtaaaattaagtacaatttgaatattgttaatggttcagcttccacttcaactgatatgaagcttgcaaagacagtaaatgcaattttggataatgagattgtcagcttagatgttttggaaaacaatgaatcggatgatgattccgaggattcagacgattcaaatgactccaatgatgaatcagataatccgaataattcaaatgataattcagataatgttactgatgattcagatgactccaataagtccaataatccaaacaatcatcaaagcaatggcaataagaataatgataataataagaattattataataaaaatggtttaagatattctaaaatgaaaaatagtcttttaaattctattgattcaaatttagacaatgattatttaaatttaaaagaaaataatgaaaataatgatgattcaaactccaataataaggatatgaattattctgataaaaaaactgatttgaataatgagagttctaataaggaaatcgatgaaaatgagaccaaattatttgatataaattattct

SEQ ID NO: 16711 - DNA, 3093 bp, synthetic construct
  source 1..3093: mol_type = other DNA
tccgaagatataaatacagatatagacacggattatcaatctgatagcattgatgtgtctgatgtaagtttaaatgatgaacagatagcatctgaggatagtttgcctaactatgaaattgcaaataaatccaaggacaaactatatgatgaaggagaagaagaggaaggcggcataacaaatgacgatgatgatgaaaattatagaattgatggaatctatgcagattatacaattacaccgtctgaaaatggaactatctttgttgaaggagaaagaatacaaataatatttaattttacagatcaagactatgagcctgtttccggagactggtttattaatttttatggtgaaagtacagatgtcgacatatatcatccatttgaagcaaccgggctcaccgactatgtcgttccaatttatttgcctccaggagactatgtcatattcttttatgaaggcgtggtttttgatgattttggtggaatagaagatgaaggaactcaattagatgtaacttttgaagatgcagaaggaaaccaattagataatccggaattctctatcagaaccaactacaacaaaaaggtatatgcaaatcttaccatagactacagtgtagcagaacttgaaaatctagtggaaggagacgatataactgcaaaaataagcttaatggatgaattcaataacaaaatgactgaaaaggttaacctagagatttacaggaatggagaaaactatgattctaaaaaggtaaacgttgtagagggccaaaataacaacatcatctttgaaaaccttcaggaaggaaactattcattggaagttgcaagcattgacagcgttccaaaatacactaacatcataacaaaagcagtcaacttcacagtcaaaagcaactatgacccagacaactaccaaatcatcctcaatccagaagatgagaaaaaacttgtaggagactcatatgaaatgggtgtaaaactactaaatccatctgaagaagcagaagaaggaagcattgacttatacctaaatggaaactttgtaaaaacattagaacttaactatgatgaagatggttactcccaccacattgtagaaggccttcagcttggccctaacaatgccacattcctataccaaatcagagatggagtaaacgtaagcgaatcagtaaacctaatcagatacgaaaccgagtccatcatagaccttgaaagctcagatatcattatcggtgacgatgcaaagatcaaggccagcctaagttaccttgacggaatcgtcaaaaagccaatcaacgaaaacttcaagctttatatcaaaaactacgttgaggatgaagatgaggtcgaatttgtctatgatgaagagtttaccataaaaggaagcgaaacaataactcttagcgacctagaggaaggaacatactacatttcagctgtatacaatggtaaaaactacaaatacctagcaactgaagaagaaagcacccttgaagtattccctaaggaaacaagagttgacgctgtcgcaagaacctattcaactgaagagaatgttattgtaggcatagaattagctgacctatctggaaaagccataaaaggcactgtaaatgttgtccttgacaacaagacaagttaccaagtaaacactaccgatgacatccaacatcctgtggaattggaccttggaaagttaggctatggcctccacaatattgaactaaactacacaggagacgatagcgaaggatggcttccaagctacaacaatgcagaattcctagtaatctatccaagcttcatgagcattgaagatggagacgtcacctccggaagcgacctgactgtcaacataagcttgacaggccctgatgatgaaggaataaacggaatcattacagttcgcatttacgacaataccggaaaatatctaataaatggagacttcaacacaacaaatggagtaaaaagcattgaactcaaaaacatcactaaggattatatcatctatggacgctactatggattggatacaagcaaaatagaaataggacctagcaatcattatttaagcagcgaagcttatggattcattagaatagctgaagggaaaagcgaaaaaaccgaatatgaccttgaattgaccaaggtaaatgacaacacagtaattgcaagccttaaggactccgattcaaagcctgttgcaaatgcagagctaacagtaaaagtgaatggagtagaatccaaagcaaaaacagacaataatggaatggccaacattagcttcagcggaaattcatcaatcaaggtaagctatactgatgcaaataacacaactgcaaaggcatctatggaaataattatcataaacaatgttactgaaaagattgtaaaccaaacagtagaggttccggttgaaatagagaagattgtctatgtaaaccaaaccgtggaagtccctgttgaggttgaaaaaattgtatatgtcattccaaacagaacagacactgcattcgaatacgaaaacatggttacaactgcagtggcatctgcagatggcagaacaggagaatacttcaatgtcagactaatagacgcaaccggtaagccattagcctacaagcctattaaaataggattcaatggagtcgtatacgaccgtacaaccgatgcagacggaagagcaaaacttcaaataaacctcggttataagggagattacacctttgcaataggattccttggagatgacaattacactggagcatttgaagtagctaagataactgtaaaacttcaaaagccacagttaagcactgcaagcaaaacatataaggcaagtgcaaagacaaagacattgactgccaccttcaagagcgaacatggaaatacagtaagtggcaaaaagataagctttacagtaaacggaaagacatacagcggaactaccaattcaaaaggtatagccagcgtaaatgtaagcctatccaagaaaggaacttatagctttactgtaaaatgggcaggtaatgatcaatttgcatctgtaacaaagagtggaaaattgaccattaaa

SEQ ID NO: 16712 - DNA, 3774 bp, synthetic construct
  source 1..3774: mol_type = other DNA
gcggtcgagaacgactatagcaatgctgacctcgatatttccaacgattttgttttgtctgataactccaacgagatcttgattgatagttcaggctcccttgatgatagcagtagtgcgctggtttccgaagggagtagcaatggcctggattcttattatagcaatgacctggtgctcaacgatagcctttctagcaggagttctgtcattgaggacagttgcagcatcgattcaacaacgatagaggataaggctctcgagaaatccctctcatctaacgaactcgcagaaggcaccaagacttacacagatctcttgaaggatatcaaatctgctaaaaacgtcctcaacttgaagtatgactatatttacgattctactatcgacaagtctcttaaaaaggggattgttctcacttttgacgaagattatgaactcacgataaacggcaatggtcatatcatcgatggtaacggtatagcgggtgggtttaactttgaaaacggcgaattcgttatcaacaatctctcctttcagaactgtaaaatctcatcattgatactcacctcatgtgatttcacgaccaactacgtgactttcagtaataattacgataaatcaagtggagcgtgcgtgtaccttgacaattcatatttttactcatctcacgacaactttatcgacaactacgcgcctagcggttctgccatctatggggaatgtagcgtcatcgatgtctatgatgggctgtttgaatcccagaagcccatcgattggtcatttatttatgggtgggatgagaccgagatctatatcgaggattgcctttttcggaatactgtgagtaattatagtaccgccgtttacggggattatattattgagatctctaacagccatttcacaaacctgttctctaaattcacgggaggcgccataggagttcgaaatgcaagtcttacggtcgaaaaaagtgagttcaataatgtgtccagtcttagaaacggaggggttatatacgcagatatgaatgtggatgaagaaaaatcctctgaagaaacaatcatcaaagactcttcattcgttaatagtaagtctgacttcggaggcgctgttcttcagctcggcgggaaattgaagatttatcgctccaatttcaccgaaaataccgcgaattactatggcggtgcgatctacacttccaatgtctctttttataccagcaaatcaaaattttcaaacaacgtcgcaaatgagatgaagggatctgctatctactttgacaacggagacctcaagatagaaaacagcaatgtgctgtccaacccgtcatgcgaaggcgcgatttatatctacgactctttctataacatatccggatcaacgttttccaacaacgatgtggcaatccactcattctttgatcgcactagaacggtgaagaatagtaaaacagggaagtcaacaaccgtgaagtccagtctcaacaacaatacatgggggggcgaccggaacaagttgaacaatgtggaatacccctacttcgttagcaaccttggccaggatattattctgaaccctgttaaaattaacgccacaataaaggacaaatatttcaacttggttgacctcggcttggtgacacctgtcaaggatcaaggcgactctggagcgtgttgggcgttcggaggcgcggcggccctggaatcagctattcttaaagcaacaggagtgtccttggacatctccgagaacaacatccagagtgcaggattgagatatagcttgtacggcaaaccttctcttacagaaggtggatacgactacactgcgttggcttactacttgagttggcttggaccaaataactcctccattgatgagtatgaccagtttgggaagatctctccgcaactcttttccgaggataactatcacatcctggacgtcatatttctggatccagcaaacacctcctccataaaagacggcttgattaagtacggggcgcttagcgcgtccgctaacggtgctgatagcgacagtaacgacttcttcaacgagaagacatacgcacagtattgtaatgatgatgaagccagcgcgaatcacattatttcaatagtcgggtgggatgacaactacagcaaaaacaatttcctgattacgcccaaagggaatggcgcttggattgtgaaaaattcatggggttcagattggggcaaaaatggctattactacatctcatattatgatgaatccctgaggtcatgttatgccgttgcgtatttgcttaacaacacgctcaggtacaataagctttaccaatatgatctcacaaattacgacgactttgatgacggggactacgatggggtgatttattccaataagttcacctcaaatggtgacgatctgatcgcggccgtcggtacgtacttcgagtatgaagacgatgattatgttatttcagtttatgtcaatggcaaaaaagcatatcagcaaaaggggacttctgcgtttgtcgggtataatactatcaagctcaacaagtatattgctgtgaacaagggcgagacctttacagttgctatcagctccagcgcaatgccctacgtcgatgacacaaggatacacctcccgaagggatcatcttttctgacagttgacggtgagcagattgacctcagtcagagggggcagatagcatgcatcaaggtgtatacctttaatgatacgaagatcaccagagatcaatctacctattacgggtccgataaaaagctcgcgatagagagcgaacttgaaggtacaactatctctttgacagactctaactgcaagtccctcggatcagccaaggtcgtcgatggggttgctcaattcgacctggtgctcgggcccggcacatacttctacacgtcatcttatgccggagagaagattataaactcctttaaggttttctccaccattggaggggtctccaacaagaatatcggttacaaagcgaccgctagtttcagccttagctttaaagatgagaatggggaaatactcaacaactcacaattcacttatacgctcgatggcaagagcaaaaccctgactacgctggatgacggtacgtacaacatttcattcaagaatcttgctatcggaacccacaagctgtctgtcaaaaatcttattagtggacaagtttctaacgctacaataaaagtggtgagtaggttttcaggagcaaaagatataagtatgttctattttgatggaacatgttacaaggtgcgcattatgggtaacgacgccaaggctgtcggcaaaggtcaaactgtcactgtcgtgctgaacaaaaaaacatacaagcttaagacggacgcgaatggttacatctcacttaagattcccaatactctcacccccaatggagcgaaggccaaagtgtactcaataaaaatgacatatgcaggacagtccctcagtaagaaaataacagttaaacaagttctgaaaactaacagtctgaccgttaaaaaaaaagctaaaagtttttccattaaggtcacactgaaagggaagaccgtccttaagtataaggtcctcaccatcaaattcaagggaaaaacatacaaagtcaagactaacgcgaaaggaattgcgacactgacacttaaaaaggctgtgatcaacggtctgaagaagggcggcaaatatacttttaccgtcacctatctgaaagacactatcaaagcgactgtgagtgtgaag

SEQ ID NO: 16713 - DNA, 3807 bp, synthetic construct
  source 1..3807: mol_type = other DNA
aatgaggatgtggataatggacttatcgattcagatgattctatcttgcagtcagctgaagtctctgattctgccattggatcagattctatcttgcagtcagctgaagtctctgattccactatagaatcagactctattgaactggaagataagggtaatgttttaaagtcaagtgataatgcttcttttgaactagatgataaaaataatataggatcagcagattctgaattggaagacgattatttagaacctaaagaaaagaatgttctttcaatggatgagaatgcatggttttataattatattgtgtggtatgatggtgatgatggagattgggtttcccttgattttgtagatgatttaaaaaatcctgaaaacatcaccatacgattaaacagttatgacactccatttgacggtgtggatttggctgttataaatgattatgactattcaatcactaaattaaccactgatgataatgggactgtagtttataatgttccatatgaggttgatgaattatctgtctttgtaggcttttggtatgatggggattttgtggccacttatggaaattgggaaagttacacaatctgcgcagtgaattggggcacttggtatagggacccttctaaacggacttacgacttttatgtctctgtgtctgatatggacacttatgaaagtccaattggcgcacaggtggtttttacaagcgattccaatcaatatgtcggaacaatagatgagaatgaaagagcaatcataccaaaggtcagctatggcacttatgatgtgaaggtcatatatgacggctattgcattcttaatctttcagattctagcgccattgagttctatgacgaccatcatacagaccctgattcacttggtgatgaaaggatagattatatgtatgtagatagtagtggagtagtttatcttgacctttgttatgatggttctctaaaagtgccagacaactccacttatgagccttatggtgatgacaacccatccggtggcggttcaggcaatcaatctggtggaactgttgctaatggcacattcacttcattgcaaagtctgtttaaccgtgctgcagcaaattcaacaatatccttaacaagggattatgtctatgatgatggattcgacatcaaaggaatagtaattaacaaggatctgacaatcaacggtaatgcccacacacttgatgccctaggcaaatccagaatattctatgttaacaatagcactgtcaaatttaacaatatcctatttgccaatggtaatgccactcttggaggtgccatttataatggaagtgccgtaaattgtctttttattaataatactgctcaagatggtggtgccatttattatggaagcgctttagtatgtgattttataaacaattccgcatctaggaatgggggcgctatctatagtggcggtgccgtaaactgtagctttataaataactcagccaatttaggaggcgctgcaatttatgattccttgtttgctgtgaattctacttttgtgggtaatacattggcttctagcaatcctacaggaggaagcgctacaacagatgtaagtgtggtgtcatttaatccaataactacctatatacctagccctccatccatgacaggttcaattggttggggaggtgccgtacttgactttacaaggcctgttatctatacggattataatgaaacattttacttgttgactaacttcactcttcagcaagatggctttaacaattacggcaatgttcaattgactggcagggatttggtcttcaagtcattatatccttactctggaaactattcaatggctcttatcatctctggacaaatctttactcctacatatgtccttggggaaaatgatacttatgaagcccattttaaactgaatggtctttctttagggctacatatggtttatgcatatgttgatttcggatatccggaatattatagctatagaataggtggaggctatatggatagggttgcttacgatagaactgcggagataatattccctattctcattaataagacagtagaaatctcatcttccaatctgaacaagtattacggtggaaccggaaagtatactgtcactcttacagatggcggaaatcctatagccaatgcaaatctcaatgtctctctagctggcaagacatatcctttaaagacaaatgcaaatggtcaggcaagcatggatataaaccttactcctggaacttatgaggcagtctgcacttatgatggagtttctcaaagatcaaatatcattgttcgctcaactataaatcttcaaaacctcactggcatttatcagaacgctaaagtaaatgccacattcttgaatgctgcaggcagtcctttagcaaacactaaagtcagttttagagtaggttccaagacttacagtgcaacaacaaatgcaaatgggcttgctacagccaatgttgatttagctgcaggcacttatgatgtgattgcaataaatccggtaaataatgagcaaaagacaagcaagctcactatttccaaagctaagtcttctataagtttaagctctacaagcaataatgataaggttaccttaacagcaagcttatccccttcaactgcaagtggaaatgtgacatttaatttaaacaataagaactacactgcaaagataagctctggaaaggcaagccaaaccattactggattgaatgaaggaaactacactgcaaatgcatattactctggagacagtaatcttaactcttcaagcgcaagcactaaagttgttgttaaaatagtcattccaactaaaataatctacaaaaatatgaccactggacctgtagcaaaatcagatggcaggataggaaattatttctgtgtaaaacttgtggatggcagcaataatgcattaacaggccttccaatcaagataggcttcaatggaaaaatctatgacagaacaacagactcaaacggcgaagcaagactgcagataaaccttgctaatgcggacatatacacctttgcaatctgctaccttggagacgatgatcatcaagcatcctttgaagtggctaagattgatgtaaacaagaagtatccaaagccaaacagtgcaaatggaaactccaatggtgtgcctgcccaagagacaataagcaatacaaagcttaagacctatatccaatacagcaatatgaccaccaaatcagtccttaaatcagacggaagggtgggagactactttgaagtcaaattgctggacaataacaaaaaggcaatggcaaatgttccaatcaagataggtttcaatggaaaaatctatgacagaacaacagactcaaacggcggtgcaaagctacagataaacctcttaaagccaacaacatacacatttgcaatcgcatacctaggcgatagcaaatatcaggcttcatttgaggtagcaaagatagttgtaaaagcccaaagccctaaactgactgctcctaaaaagacatttaaggcaaatgcaaagaccaagtctgtctcagcaactctaatctccgagagaggaaagcctatggccagtcagagccttaagtttacaataaacggcaagacatacacagccaaaaccaattccaatggtgttgcaacagtcaatatcagcctaaacaagaaaggaacctattcctgcacagtcaagtttgccggagtgactggagcaaatgcaaagaccactaaaacaacaataaaaattagt

SEQ ID NO: 16714 - DNA, 4305 bp, synthetic construct
  source 1..4305: mol_type = other DNA
ttgtacatctcagagatagagattaatcaaaacattatcctaaacactgaaggcaataaaatatatctaaacaattcccctaaaagcaatatacacgataactggtttggaaacactctgctgaactatgatgaggtgccatatgaaggctgcacaaattggatattcctaaatggagaaagcaaccaggtctcactggagaatccgatcagctttgaaatcacatttaccctatcctctttcaataagaatacaaagaaaataagcaactatgatgatagaaagcttccattcaatctaacagcacatgcagagcatggaatcttaaatccgaacagtaatcttttaggaaaaacaacaatatatgaaacagaaatcatcaatgttgagagaataatcggaaatattgcaaatatagattcagaatttgaaataatggagtttttagtcactgacggaaccacattctatgacttgaaccaactcatcaacaacaacagcaataatgaaatcaatataagcggaaattacacatatcatgatgatatagactttgaatttaaagagggaatcaatgtcaaccgcagcctaatcattaatggaaacggatttacaataaacggattaaactcctcacgcatcttcaatataaatggagacaatgtcacaataaataatatttcccttataaacggaaatggatatgaggacacctacgacagtgacggaggagccatatactggaaaggagctgacggaaccctgattcaaagcaatttcacaaacaacagcggatataatggaggcgccattctctgggaaggagacaatggaagaataataaacaacacattcaaaaacaacagcgcattcgatggaggaggtgccatcaccataacagtagagagaggaataataataaacaacacattcacaaacaacagcgcatcctacgatggaggcgccatctacctaatagcaagcagtggagagataataaacaacacattcacaaacaacagcggatataaaggaggcggaatgatctgctatgcagataatctaagcatgatcaacaatacaatggaaagcaacattgcatccgacgacaatggaggcgccattctctgggaaggagaaataggaagaataataaacaacacattcaaaaacaactacgcctctgaagaaggaggggctatcagcataagaggagagataggagagataataaacaacacattcacaaacaacaacgcatcctacagaggaggagccatcagcataataataactagtggagagataataaacaacacattcacaaacaacagcggatatagcggaggaggaatactttgctatggaaataatgtaagcataatcaacaatacaatggaaagcaacattgcatcctacgatggaggagcactttacgtcagcatggattatgcaatgataataaacaatacaataaaaaacaacaatgcatccgacaatggaggagcaatctactgggatagatataagggaataataagcctaaacacaatcgccaacaataatgcaaatcatgggggagcaatctactatgagggatattcttcaaatcttaactataacatcatcttaaacaataagaatagtgaaatctatttcgacaatgtcagaactttcaacggaagcaataattggtttggaaacaatgcaagcaattataatttgaatccaaacactagcttcgaatatgacaatagcccaaatgtaacccttagtgattggctatttttaaatggaacagcaaatccaaaaatagtgaatgcctttgaaagctcccaaatcttatttaaattatattcctatgacggaatattgataagtgaatatgacaattccctaataacagacaccaagctaaacttaagtgcagaaaggggaagatttgacaagacaagcgccagtttcaatgagccgataaactatactgcaatagaagggggaagagatacaataagaggagcaatagataagagtggatacagcataaatctaacaaacaggagagtatcctcaaaaattgcaatggatactaaagagataaactatagcagaaatgcatcaatcaagcttaattacaatgactttgcaggaggaaatgtcacaataagactaatgggagaaaataatgaatacctctttgaaaacatgaccctgaacaagacaatattccttggagtcataaatagggacagttacaacgtaagaatagaatattcaggagataggtcattcctagaggagaacataagcgaaagccttatagtgaataaggcaggaacaaaaatagttccaacaaatgacacaatagacctaggcataggagagaactcaaaagtcaactacactttctatgttatagatgatgaaggccaatacataactaacccagaggacattggaaacataagcttcaagtcagatggaagcgcagtcgaagtagattcaaagacaggggaaataaatacaattaaggaaggaactgcaaacatcctaataagattccaaggagatgaaaaccatcttgattccaatgcaagtgtatatgtaatttcaagtaataaaataaggaccaaaataacagcagaaaacctaacaacagattataaaaaggatgactacatcatagcaagattaaccgacctcacaggaaaaccgatagccaatgcaaagctgattgttgaacttaatggcacaaataactatacaactaattcaaagggagagataaaagtcccaacaaaaggattggattcaaatgaatacatagcaaagatcatctatgaaggagatgaaagctacagattttcaaatgcaagtgtaagactaatagtgaataagctaaatacagaaataactgcaaataatatcacaacaatctataatataactaaagaattggtgattagactaaaagacgtcaatggagacccagtaagcggggttgaactaactgttgacctgaacggaatgaataattatacaacagatgataatggacaagcaatagtggaaataaaaggattgattcctaacaattacacagcaaagatcacatttgaaggcaatggaaactataacaaggccagcacagaatcagatatagaaatattaaaaattccaagcattttaaatggaacagacatgacagtaaactataaggaagataaatatttgacagttagcctaaaagacaaagataataagcctatccataatgcaagtatctcagttgaattagagggtattaaaaattacactactaattctgatgggcaaataaaagttccaacaagcagtttacctgcaaaaaaccatacagcaatgattagatttgaaggaaacgaaatttacgaaaaatcaaatgctacagcgaaaataactgtaaataaaatttccggcaaattgactgcaagcaatgtcactgcaagatatggagacaatcagaacctagttattagtttaaaagacagcaagaaaaatccattaagtggttttaaagtgtctgttgacttaaacggcaaaaagaactacactacagattcttcaggacaaatcaaagtttcaactaaagatctagttccagacacttataaggcaatcatagtctttgcgggaaatgagaactatacaggatcaaatgcaagtgcaagtgtgagaataaatagaataaatacaacattcaaatacacaaacatgaatacaattgcttttgattcaaatatagaaggacgtattggagaatatttccgcttccaattgttggatgaagatggaaaaccattatctggcaaacaagtctttattggatttaatggagtcaaatacaatagaacaacaaatgaaacaggagaggcaaggcttcaaatcaacttaaaatatgtcaaccattatacctttgcaatagcattcttaggagatgattattataagggaagctttaatgttgctttaatcaatgtgactgaacagattccagtcttaagcacaagtgctaaaacatataaatcaagtgcaaagaccaagactttgactgctactcttaaatcatctagaggacatgtccttgcaggcaagaagattagttttacacttaatggaaaggtatacactgcaaatacaaacagtaaaggtttagcaagtgtaaaggtctctttaagcaaaaaaggaacttatagttttacagttcagtttggaggagacagtacttataagaaggtaactaaaagttcaaaacttacaataaaa

SEQ ID NO: 16715 - DNA, 4413 bp, synthetic construct
  source 1..4413: mol_type = other DNA
atgtccgaagatattggaatcaatgacaataatggtgctttgatagcagacgttaactttgctgatgacaataataatgctttaaaggctgaatccaactctgctagtcagaatgacgcttcaatagatgaatctgctaatcccactcaagatcttgtagatacagataatggattaaaccaatccatcactaaaagcccactaaaatccaatactggcctcactgttacaaaaacaattgataacagctctaaccatatgcctgtagacggattttacgacattggagacactatctactataccatcaacataaccaacaatctagaagaaagcataggcaatatcagtgttgttgaaaacttccctgatggattgatatgggaatatatttggtttgctgatgacaatccaaattggaaaaatgagagcaatgtattcaattatacaaaagcattagagcctgaacatagcatccttctcaagatacgtatgacaggaaataaaacaggcacttacattaacacaatcaatgtaagctccaacctaacaagctctcaagagttcttatccgaagaagtgactgtttatgctccaaatttaacaattacaaaagtggccaatgatccaatcgttaccattggagaaatagcaaactttacaatcaacgttaccaataacggaaataggccattaagtaatttgcgtatctatgaagatcctgaagaatcattattcctaaatgagttcactaacataagtggaaattgggactcttttgcaaatcgtggtggagattacggttttagcttggaccagctggatataggtgaatctgctgctataatagtatcttttttaacaacagaaattggaaatttcaccaataatgtctatagcaactatccgaatcctcaagtagaggcaaatgccactgtcacagttgttccaagaattgaaaagactgtcaatgccactgaaattgatatgggagagtctgttgaatacaatgtttacatcgacatgacaggagccaataaattaggcattgatgactttaaaatcaaggtcaccgacattttaaacgaatacttcgatttggataaagatagcatctcctcaaattggaaatataatagagatgaaaaggcctttgaatatatgctaagcgacattccagagtcatttgaattcaattttgctgtatatatcactgaaagaggaaattacaccaacacagtttcccttaaaataggtgacctgcctgaagtcagtgctgagtctgatgtcactcatgtcagaataagtgatgcaaatatcgctgaaactgccctagattcaacagtaaatcttcaagaacaagcggttttcattgttaatatcaccaatactggagataagacatttaatccttatgaacttgttgtaaacgacgactatgatgaagatgctctaacttacctcagtcatgaagatataacaggcaaatggatagagaatattgaaactgattccctttcatttacattgaattcaacattagaggtaggagaatctgcaagctttaagctttacttcaatacaagcaaggtaggatcttattccaattatgtctatattaacattaatgataaagaggatgattcaatagtcattgtattagctctcatgaacaaatcagtcaattcaagagagattgatgcaggagactctgttgagtataatatcttcattaatttaagcggatatcaaggccctgtaaaggttgaagaccttttcaatgatacatttgcattggataaggacactatctcagagaattggcattatgatgaaacagaaaatgctttcattttcgatcttagcgacaatccagacaccttaaaccttagcttcaatgttacaatcaatgaaaaaggcaattacactaaccttgctaagcttatattaagttcagattatcctgaaatcacagctgaagctccagaggtctgtgtctacaagccggatatgacagtgacaaaaacagtaaacgacactgaaatatatatcggagatactgtaaaatacactgtcactatagataacactggagatagaactttaacaaacattattgtcaaagacgaactggaccctgcatttatactggatgaatcctctatcactgaaggctggacttacaacaaggacaattcttcattcacttacaacaataacataagcgttggagaaagcgccatcttagaatttattgttgagataagcaaagaaggcaaatacacaaatattgtaaatgtctcaagtccaggagttgctaataaagaagctaggtctgaagaaaccgttgctaaaactattccgaccaatatctgcctagaaaacgtgactgccgatccagacagttttgtgagaataataatcaacataactgcagataaaggcttaattaatggaacagtaaacattactttccctgatgggacaaatgaagctgtagaaatcacaaacggaattggagaaacagtctggtatgttcctgataattatgcttcaggaaactacagtgtctttgcatattatgaaggcaatggaacttatttagaatctgaaggccaaggaaatattgaagttattccatattacactgaaataagcctatctaatgtgactgcttatccagacagtgatgtggaaatagaaatcaacataactgcaggagatgctaagcttataaatggaactgtaactgtaagtttcccagacggcacaaacaaaactgcagaaataatcaatggtacaggaaatgtaaattggactgtaccagatgattataagggcaattattccataagcgcaagttatcctggaggtggaaactatctggattcaaatgccacagccaatattgaagtcatagcaaagatcagtactcaaatcacagcagacattcctaatgcctatccgggagaggagatagatatttctgtaaatgtcacagcagataatgatgtaccattcaatggaaatataacagtgaatctacctgatggctctaaagaaactgtagagattaaagacggaaaaggaaacatagcttggactgttccagacaatttggatgtaggagattataatctcaccctcactttcgatggagataataattacctgccttcaaatgcaacaagcaccctaacagttgaaaagataaaattactcatcattatagataacattactgctcatccaaaagaggatgtgactatttctgttaatgttgctatagatgatggtagtgagtctgataattcaactaaaggttctttatctgataacaatctaaataagggtgctttatctgataacaatctaaataagggtgttttatccaataatgataataaggctttattaaaggcttatatcagttcagctaaaggcattctatccagcaaccatcttaatgatggagataatttcaacggctatgtcaatataaccttaccagacaattccaccgttgaagttcaagtcaaggatggaaaagctgctctcaattggactgtaccagagggatacgaaggtgaatatccaataaaagtcactttcaacggcaatggaaaatatctatctgccagcgagacaggatacattacaatcgaaaagatcccaacttcaatcgaccttgaaaacattggaacaaagccaaacagagaaatcataattccaatcacaataaaaactgatgatgacgttccattcaatggaaaagtaagtgttgaactgcctgatggcacaattcaaacagcagaaatcacagagggcattggaaacacaacatggactgttccagatgattataatggagaatataattatacagtaagatttgaaggagacgaaacctacctcccatcaaacaatactgctataattaaggttgattccaagatcccagttgaaataattgttggaaacattacagcaaaaccaaaagataaggtgacaattcctattgaagtaatcactgcagaagaatccttatttaatggaaatgtaactgtaagattgccagacggaactgaagtcactgcccaaatcactaatggtgaaggcagtgtggaatggacagtcccagaggattataatggaacttattccgttagcgtaagattcgatggagatgatacattcctagaggctgatggaactggatttattactgtaactccagagactccggataatccagtgcctccaataagtccagtaagtccagataatccagtagctccagcaaaacattcagctaataagccgatgccaatggataaaacagctccaggtaatcctataatggcattgttaatagtgctttcaagtttaatttttgtaagaagaagtagaaaa

SEQ ID NO: 16716 - DNA, 4917 bp, synthetic construct
  source 1..4917: mol_type = other DNA
gaaaatatcaatgaaagtgaagttgttggaaatgcagaaattgaaaataatttaagcagtactaatgataattttgaagtttcaaaagatataggttataacgtctctaaaaagatttcaacggataattcaaatgaaaatttaagaaattctcaacacatgactttatttataattagtgataatccgggaacaaatattctggataaagctattttagaactttccaatgaaaataagataaatggtgtaaatttaattattagaaatggaaatcaagtaaaatcaatgaatgaaaatgaattaagttatttattatctgattgtgatgcttttataggtgaatggattagtagtgatgtcgattctgtattgacaagtgttttagtaaaaaatcctgatttgtctaataaaaaattatttcttgtattggaacctccttccggcaatttaaattcaggatccagttcactgaatttaattaggaataataccttgaactataataaaatatttacgaattactcgaatgaggagttaattagttattttaaaaatactaaaaggggcaattcatattctatcattaataattatttaacaaatggtaacggaaaaaatttcgattcaatttttaatcgattagttctttataaggatttgaatgataaaaataatttgaaaaatcaaatattgtttattttaaattatttgggcgttgatgttagttatgaacagccaacatttaccggtgttaaaaactatggtatttatagggatagatggtactccttggatgagtatatttctactttttttaaagcaactaataataggacggttgggattttagaaagtaaaatgtatattgaatctcagcagttaaacacttgctattcaattataaactcattggaatcaagaaattataatgtaattcctgtctttgctgatggaggatctgctgaacaattgaaggtcatggttgaatcctggacaagtgcgggagatgatatttcaggatttttatctaattcttctaattttgatgtttatattgatgcgattgtatcgatggtggcatatggtgttggtggggaaaacttcacaaaagcaacatctttttttgaagaagctggtgttcaggtatttagggcggttcactcggatcatgtttcaaatgaacagtgggaattaggttctactggtttaactacagaaaaaagtgataaatggtggcacattactattgctgaagcgcaaggaataattgatgccacattcattggaggtaattcaagttatatatcaaatttaaccggagctcaaattaccacttatattccgcatgaagggaacatagggttacttgctgacagaatcgattcttgggtggatttaaaatacaccttaaatgaggataaactgatatctataatttattataactatccaccgggaaaacaaaacatcggttccagttatttagatacaataaaaagcatttataatatactttatactttaaaagctgcaggatacactgttggaagtttgccagttgatgttagtgaacttgaagatctaatgcttacatgcggtataaatgtagctacatgggcaccgggagaacttgaaaaaatagctaatagatcttgcataactttacttccggtaagtgaatataactcctggtttaattcattagatgaaattgtaagaatacaagtttctaacggtactgttgcatatattggtgagttaactaaaagagccgttgaattagattataccaaaacaattggaagcacaattgacgactggtataatcaagttgtttccttacttccagatgaaaaatcagttgaagcaaaagaagttttaagtaatattgtcagggctttaaaagattatgctaatactcattcacaagactattatagattatatttaaaatattttgatgaatttaaggaattaaacattcaaggattaaatggatggggtgaaactccaggaaatgtcatggtagttaataaaaatggtacagattactttgtaattcccggattgacatttggaaatatattcgtggctccagaacctcaaagaggatgggagtctgatattaaaaacctttaccattgcactgctgttgctccaacacatcaatatttggcggcatattattatatgcaaactagaaatccaaatgcgatggtcttcaccggaagacatgcaacacacgaatggctgccgggtaaagaaattcttttgtccgcaactgattatggatcagttgttgttggcgatgtgcctcaattatacttctatattagtgatggtttaggtgaagctattcaagctaaaagaagaggatttgcagttattatctctcacttaacatctccaatgtcttatgctcatttgtatggtaatctaacttctcttgctaatttgataaacgattatcaaaaggtagggagtaactcagaaaaaaataaaattggagaaaaaatacaagatttgataattagcaatgattattcaaccaatttaggactcaataagagtcaaataaaaagcatttctattgattcattaatagaaaaaattaatatatttttaaaatcaactcaggatactttacatccgttaggccttcatgcattaggagaatattggagtgaagaggatattgccagtacagtttctgcaatgctttctcatgattttgttttagagaataatcagggaacacttaatttatttacagaactttctaattattactattcaaaatcatatggtgatttaactccatttgaaagggaatttgtattgaataaatcttatgatatatgtaaagcattaatttattgggatgttaatactataaatgaggtattaattaatgacaatgttaaatttaacaattctaacttctatgcttgtttaaatttggctaaaagatacataaacctaattaatcaaagtatttcaaatgaactaaatgccatgcttgatggtttaaatggcagatatattcctacaggagaaggtggggaaattgttgtaaaaccaagtattttaccaacaggtacaaacattttccaagatcaatcatctgaactaccaacacaggatgcatggaattatgcaaaaattcttgcattattaactttagctgatttaaatgacactactgaaaaaattatcatggggatatggtgtgttgaaacagcaagggatgatggtgctttggtttcaactgttctttatttgttgggcatgaaacctgtttggacaaattcttcaagcgccggctttgatgatgaaggaaatcctactggaaaaaaagttggtgcaatgcctgaagtcattaaattaaatgatttaactcgtcctgagggttggaataaaaaaagaatagatgttaccataattactagcggattattcagagatttatactcttctcagtctgttttaatggataatgcatttagagtagcattggcaaggtcatatttaacattaattaataataaaactttaatgaatggaaaatatggcaaggaattaagacaggcattggactgtgtcatggagggtataaattattatagggcttctaatgaagctttaaaagataattatgttgctcagcattggattaaagattgcctatattatttgagtattggttataatgcatcttatgcaggggaatgtgcaattacccgtatattcgcaccacctaatggagattatggtgcaggaatatcaaaattggtgtcaatgtcatggacttggaacaacacagacgaattagctcagttttacttaggtcgaatgggaaatatgtattctaaaaattactggggagatacaaatccattagtatttctaaaagcattatctaactcagacacaataataacaagccgcaatacaaatcagtatggtgtattggataatgatgacttctttgattattggggtggtttatcaatggctgttgaacatgtttcaggtaaatctccgaaaatgaatgttttaatgtatgctgataaggataatgcatatatttcttcacttgaagaggttatgtatcgtgaaattgcttccagatatgacaatccggattggattaaaggaatgatgaaggaagggtacggtggagctcgttatatgtcaaataaatttgttagcaatttattaggttggcaagtgacaagaccggattcagtttcagatgatttatggaatagggtgtataatacctattataaagacaaatacaatctgggtgttaaggattggttaatgagtggaaataatgcctattcccttatttcaatgagtggaacaatgttgagttcaattcataagggatattggaatgctgatgatgcaacaataagagatattgcaaatacttgggtgcaggcaacagttaaaaatggtgttgcatgttgtgattgcagctgtggtaatgtggctatgatgcagtgggcagttcagtatgtaaatcctgatattttagcacaattattgccgaaattatatgatgcaactgaaaatccagtattcttaaacaatactcataatccaaatactaaacctgaaaacaataatgatcctcaagtagaaccttcaactccaaatcctactgatggttcttcttctagttcaactatttctaataatgcaacttccacaaattctaatcagcattcattaagcaatagtcaaaattcacaaggaaatgcggtttctgatgtgggagacagtagttccagtgattcaggtacttttagttctgaaggtgctgatgttaaaaaagcaattgaaattaatcctatcacccaacaatctgcaagtgaagttggtatgagtttacttgcagtttta

SEQ ID NO: 16717 - DNA, 4977 bp, synthetic construct
  source 1..4977: mol_type = other DNA
gcttcaagtgatcttagttcaagtcctgccgataatgaaaacttggaaattgatagttttgactcaaatgaggatttaacagttaatacgaatacaaactatattgaaagcggaaataatttggaaattgattataaatctaattctaaagaatctgttaatgcaacaaatgatataaaagaagaaactgttgattacaatgaagatatttcagttgaaaagaataatctaaagtcttctaaattgagttctgtttataaaataacagaatctaactactctaactactttaataaaagtggaaacatcctatctaatgtaaaccctggagatacattagatttttcaggttcattcaacaataaggactttaaaatagatattccattgactgttacaagcagtgacggtgctcaattcattgattgcagcttcaagttcaataagggctctgacggctctaacatatccaatttaaacattaactcttctcgcttacaaagtccgcttatctatttggattctgtcagcaatatgaatgtattcaacaacaatctattttcctgcgcttcaaaatcctatgctctttgctttagcaatgtaagctattcctctgcatatcacaacacccttcagactacagcatttgttgtaggatggggacatccttctgcctttgtcttggctggagcaaataacttaaatatctcctcaaacaatgtgatagtcaacgattccaacggaatctatttcactacatatgttggagacacaattagcgcgaacttaatcaatgaaaataattatatctttaacaataccgttcacagtgtccgaggagttgaatgggcagttgatgaaaatggaaccactcctctcccatcctctttctgctatgcgatacaagtgatgggaagcggtaataaattattgaacaatacggtctacaatgcgtataggggcataagtgcttccggatcaaatagtgtcgttgccggaaatgtggtttatgatattaagggaaattattatagcggaaatacaaaggatgacggcggagactatggaataaatgtaggaccaaattccatagttgaaaacaatacaatatataattcccattttaataaaaactctggagtggccatttctgtaggttcaaatacaactgtaaggtataataacataacaaacatcaatggtacaggggctgatttgtctaaaaacttcatagaatttagccataatcgcattgataatgtttcagataatggaataagagttaaaggccaatatggtaatactaatatttcagataacttcattaattcaacagacagttcaatcactttattgagaagctcaaaggacaaatatccgtccagaatcaatatagaaaataatgatttctatacagatgtctctcctatctattatcttgaagggtatattggcaagctgacagcaaaggacaatactctcaatggttcttccatatcagatattagtattgacgttcctagctctagcgaaactaaggtttctataaattcaactaaaatagatttcaatgaatctgttctaattatgccaactgtcagcgcctatggtctttcacttgaaggccttgtcgatataatagtcaatagccaaaagattgcaactgttcctataggatctaattacactttcactccaactgaagcaggaagttttagcataaacgctaatttcacaggtaatgaagagtataagccatctgaatctgctgttttgattctgactgtgactcctaaggaaactaccacttccataataataagcccaagcactgttgagcttaatgatactgttgtcattagtccttttgttcgctacaatggaactcttttagaaggttttgttgatattcttttagatggtgaaaagttagatactgtagagataggctctgattatagttatgttcctaatagttcaggcagtttctacatcagcgctagcttttctggcggaaatggttatggtgcatctgtttctgatatgctcatccttactgtaaatgagtccagctcaattgaggatccggatgatccaactaatcttacagtctcttcaatccttatcagccctaacactgttgaggttaatgatacagttcttataagtccttttgttcgctgcaatggaactcttttagagggtcttgttgatattcttattgatggtgagaagttagattctgtagttattggctctgattatgcttatgttccttctactgccggcacttttaacattagcgcaagttatgctggtggaaatggatatgagccatctgtttctgatattgttgttcttactgtaaatgaaaagcaaattattgataatggtacagataataatggtacagacaataacggtactgatacaaacggaacaggcactaatggaactgatactaatggtacagacaataatggtactgatacaaacggaacagatactaacggcactgaaaataatggaacagatacagatcaaattaaaataatcataaatgatgacaattactctgattactttgataacggctatccaattgatttagatgttgatggcaattatactctaattatcgactcattaaacaacaaggacataataattccatcaggatttaatataaacatcataggaaaggaaggctctggaacaataaacaacggtacaattcaattaggtgacggcacagatgaggtcggtgatgtaaagatatccaatctgacctttaataattataataaggatgctatagtcataaacgaaattgcttatgatctaactgttgaaaacaataagatcataataaatacagaagccagtcctggaaacctatactttagcgtttatggaatcaatgcaaagggctatgttgattcattggctgtaagagacaacgatattttcctaaacggttctgctccttacttatatggtgttagtttgggaggctacggtgccatagcaaaccctcagaatatattcgttcaaaacaatacaataaatatcaacagcactgcaagtatgggcatggctgagggcatttacttagacaaccctataaatgcagctgttttagacaataaaataaatatagaatcaatcaatgatgtatatgtttacggcatgcagattgcagactctgcattcagcgccataggggaaggaaagaccggtgtcaaatccccatatgacataatgattgaatcaaatgacttgaatcttaaaagcaaatatatggtttatggaataaccattcttgattatggctgtgacggcagcttgaatgaattaggtcagccaatgaccaatatgatggacttggacactacaatccaaaacaacaatctcgttgccgattctgaaaaggcagttatgggaatcgttggaaagacctacaatatgtctgttttatgtaacaatctgtctgtaattggaggatccattgaaggagttgcatcccatgatgcattaggagttgataattatgctcttggagtccaatactctggaaaggattatactgttcttgtaaaggacaatacagttagcacaaatgttttagctgagtatttaaacaataaagactatgaagcctatgtttcatttgttaacaatacaatatatcatattgatggcccatctagtggaaatgatactccagagaatggcactggtgataatggcactaatactaatggaacagatattaacggtacagacactaacggaactgacaacaatggcactaataatggtactaatggcactaatggtacagataccaacaatacagacaatataactaaaagaacagttaaagatctacaggaacttatagataatgcaactagtggttctgtagttgatttaggcaactttgaatatcttgacgtatctaacattgatataagcaaggatatttctattgtaggaaacaatacagtcatcagaactgcaggtgacggcaagccagtcttcaatattaaggaaggactttcctcagtttcaataagcggaatagaattcatggcaaataatggagatgtacttatcagagctaaagcagtcaattcaactagcagattggctatagaaacccctgaaattaatataataaataatactgtaatcaagtcagatgatggtgttgtagccgaatcagtcactgttcttgaattggattcttctagatgcatacttgctccaacaaatgatatcaaggtctcaaacaacacattggaaattggaatgaatccatttaactttgttgtggaaagcgtcattaacgctgctgatgttaatgttccagtagggggagaccttcaaagcaaagtcaaatccgtaattcattatgaggatatggataccgttgccgttgcaaaggctgatggaagggtaggaaaatactttgaggttaatctgactgacagtgatggaaatccattatctggcaaattcgtacagataggattcaacggtgcagtctataatagaaccacaaacgaaacaggtggtgtaagattgcagataaaccttggatacaagggaacctatacatttgcaataagctatcttggggatgagaattacaatggaagctttgtcgttgcaaaaatcaaggtaagcacacagaatacaaagatcactagctcatcaaagacttataaggcaagcgcaaagaccaagactcttactgcaacacttaagtcctcagttaacggcaatcttataagcggaaagaagctgactttcacagtgaatggcaaatcatacacagcaactaccaattcaaagggagtcgctagcgtaaaggtcagcctttcaagcaagaaaacttatagcttcactgtaaaatatgcaggagatgatacatactcatcttccagtgcaagcggtaaacttactataaaa

SEQ ID NO: 16718 - DNA, 4605 bp, synthetic construct
  source 1..4605: mol_type = other DNA
ttaaacaatcatcctgaattgtcaaataagaaactgttccttatcttggaaccacctactggaaacatcaattcaagctccagttcattgaatttggttagaaactctacaattgactataagaagatattcaatggaatttccaatgacgatttgataaattatttcaaggctaccaaaagaggaaacaacttcgaaagcattcaagaatacattgacaatgaaggaagctcttttaatagcatctttaataatttggttctctataaggatataaacgataaggcaaatcttaaaaacgaattgctctatatcctttatctattgggacatggatgttcctatgagtctgcaaactttacaggagtacaggcatctggaatattccgtgacaggtggtattcatttgatgaatacgttctcaccttcttcaatgagtccagaaatcgtaccatagggattttggaaagtacaatgtatatccaatcccaacaattggatttggtaaatgaaatcacagaacgccttgaatcaaaaggatataatgtcattcctatttactgtccggcaggtaacgccgaacagctaaatatcatggtgaaatattggaccagtgcctgttcaaacatcagcggattcttagagaatccacaagactttgacatttatgtggatggaattatttccatggttgcatatggtgtcggtggagagaacttcaccaatgccacaaaattctttgaagatgcaaatgtgcctatattcagagcggttcactctgaatacattaccaatgagcaatgggaattaagccctgtaggtctctctaccactaaaagtgataaatggtggcacgttacaattgcagagtcccagggaatttttgatgctacatatgttggtggtgttgactcttatatttcaaataggacaggagcaatcatattgacttttgttccagttcatgagaatatagaactcttgactgatagggtagacgcttgggtggacttgaagtatactccaaatgaggataagaacatatccatcgtatactacaactaccctcctggtaagcagaatatcggtgcaagctacttggatgcaatcacaagtgtctataatatgctttataccttaaaggatgaaggatactatcttacagacttgccaaacaatgtttcagaacttgaagatatgatgattgcctgcggtataaacgtagctaactgggctcctggagaagtcgaaaagttagctaaccgttcaggtgtcgctcttcttcctgtagatgaatacttggaatggtttgattccttagacgatattgttaaagtccagattaccgaaggtcctgttgcctatattggccagatggttaggcgtgcggttctaatcaactacaccgatgaggtggagacaatggtcaatgattggtacaatcaaatcaaggcattgcttcctgaaaatcagactgttgctgcaacaaatatattggataagcttgtaaacagcctgaagctctatgcaaacgcatcttccgatggcgatgaaaatgcatccctttactatgatgaattcttaagatattatgatgagtttaaaagtttgaatgtttctggattaaacggatggggtgaagctcctggaaatatcatgctggttaatcggaatggaaccgattactttgtaattccaggtcttacattcggtaatgtcttcattggccctgaacctcaaagaggttgggaggctgacattgaaaacctttaccactgtacagctgtagctcctactcaccaatatttggctgcttactattatatgcagaccaggcaatcaaatgccatggtatttgtcggaaggcacgcaacccacgaatggttgccaggcaaggaagttttattatcatataatgattatggttctattgttgtcggaaaggttcctcaagtatatttctatattactgatggtttagcagaggctatacaagctaaaagaagaggatttgcagtattgatttcccacttggattctcctaaatcatatactcatttatatggtaatctaactgtattggcaactctattggaggagtatgataataatcatatcattatagagtctgattctgataaagataatcaggctatcacttatcaggtaatcaaggataatcagactatcacttatcaagtaatcaatcaagagttagaggacaatctaacaagagcaatcaaggacttggtaattgcaaacaattactaccttacaattggattcactgcagaggaattgaacaatactgacatgttctccctaagctcaactttaaatgctttcttaaagaacactcaaaataccctatatccattaggacttcatgcaataggtcagaaatggacagatgaggatttggcgaacaccgttgcaatcatagtctctcatgactttgaatatggcggcaagaagaccaatctattcgatcagctatccttgtattactatggggaaaaatattccaatctgactccattgaagcgtgattatatcctaaacaggtcagtggatgtctgtaaggctttaatctattgggacacagagacagtgtctgatacaattggtataggaagtccagagttcattgagtcattaaacattgcaaagaaatacattgacctttacaatcaatgtatcagccttgagctggaagagatggtttccgccttaaatggaggatatgttccagtcaatataggcggggaaagtgtgactgtccctcaagtgctccctacaggagcaaacatgtaccaagaccagtcatctgagcttccgactcaaaaggcttgggattatgctaagacactctcacttctaaccttggcagaccttaatgacactacagaaaagataatcatgggtatctggtgtgtagagactgcaagggatgacggtgccctagtctctacagtgctctaccttttaggaatggagcctgtctggcataactcatcaagtgcaggatttgacgaagagggcattcctacaggtaagaaagttgaggacttgcctaatgtcatagcattggaaaacctcacccgtcctgacggatgggctaaaaagagaatagacgttactgtgattaccagcggattgttccgtgatctatacagttcacaggcacgtcttatggacaatgcatacaggatggctttagcttgttcatattacactatcgtaaacaataagacaattatggatagcgaatatgggcctcaagtctatgatgcacttagatccatcatgagaagcattagcttcaagggaatgtcaaacgaatcattagaagacaattatgtcgctaagcattggctagaggattgcatctattatctaagcctaggctataactctacagtctctggagaatatgcaataacccgtatctttgcacctcctaacggggattatggtgctggaatatcaaagcttgtgtcaatgtcatggacctggaacgatacagatgagctttcagagttctatattggcagaatgggaaacatgtattcaaaatattactggggagatacaaaccctgtcgtattcatgagggcgctatccgatacagaccatattgtggtaagccgtaataccaaccaatacggagtattggataacgatgacttctttgattactggggaggtctctcaatgacagttgaatacctatccaacaagactcctacaatgaatgtattgatgtatgcaaataaggacaatgcatatgttgcaacattcgagaatgttttctataacgagcttaatacaaggtatctaaaccctgaatggatcaagggaatgatgcaggaaggctacagcggttccagatatatgtccaacaagttcatttccaacctatggggatggcaggtaaccagaccttcatctgtctctgaaacagtttgggatgacgtttacaatacctattataaggacaaatacggattaggagtaaaatcatggctccaatctggaaacaatgcatattcattgatatccatgagcggaacaatgttgaattccgcatattcaggatattgggatgcagatgatgctacattaagtgatatagctaacacttgggcacaggctacagttgcaaatggggtagcatgctgtgactgcagctgcggaaatgtggcaatgatgcaatgggcattcaagtatgtgaatgctgatttgcttgctaagttgatgcctaagttgtatgacgcaactcaaaatccgctcttctatacaaatagcagtgatatgcctacaaactcttcgaatattgaccgccgaactacaaacagcagtgcagagtcaaacaatactgaaactgttcagactaactcaagctctaacagtcagcaaagcgctaacggaaacactaatattccaggagcaagcggcggctatatggtaggtacagaagcggatgcccaatcagatatggccagtgattcagatgcaggaatgaacgatgcaaatggagaaggcagatctgtagaggtcactaagagcacaagcactccagtggctccaaaggacgtaagtatg

SEQ ID NO: 16719 - DNA, 3906 bp, synthetic construct
  source 1..3906: mol_type = other DNA
ggcataagaggcccaaggatatatatcgaccaatattatggagaaatctccaatagcggcaatgtttataccgatgaatatgaagaaaagggattgttttcagattatggaatgggaatttcttttgaaagcaatgaaggtttggtcccattgattcactattacccttcaaacgagtcattgccttcattctatgaccctagaggtggtggagattcagaagatgattatgaagatgaggatgatgattcagatatagctgttaaagaccaaggcattggaggcaactgttgggcattttcaggaattgcaacccttgaggcatgccttgaaaaggtaaccggagaggaattcggcttttcagagggcaatgctaaaaaccttatggccatatcatccatttatggcttgaacatagacacaaacaatggaggatatgacacaatgttccttgcttatcttgcaagctggctaggtcctatctatgaggaatatgatacatataatccattatcctccctatccatagatcttccttcagtattccacattcttgacattgatttcttggctcctcgtaaaaacagcttggataatgatgagtacaaaagggcgataatgaataacggagccgtttcagtgaccttcgattgggtggaaaataaggtttccaacggattccattcagtttccattataggatgggatgatgattatgatgacattgactccttaggaaactatgcaaagggcgcctggatatttaaaaacagctggggctatgaatggggagatggcggtttcggatacctttcctataagcaaaagctttcagaggagatagctccatatatgcatgcatatacattttcatttaaggaaaatgacattggatatactgacatatatcaatatgacttttcaggattaagcgatttcctgattttaaattccacaaatgcctattataagaacaagttcatagcagaggacaatgaattcctatatgcattttccacatattttgataaggagaccgatttcacctattcagtttccataaatggcaatgtcattacaaaaacagaggatggcaaagacatattgacttctatccatcattctccggctggatatcataccattccattaggctataacctgaccttgaaggagggggatgagtttgagataatcataaaattgctgaatgacaatcaaaacaggattcctgtttgccaagctgatgaattgtacagaacttcactgccttcaaatgcatctttcatgagtttaaacggcaaggattggattgacttgagcaatttagcttcatccaatgagttctcttcacttggcatcaaggcaaacacttcacaagtagcttgcataaaggcattcacttccaattggagaatgaattcggattcctctatagtgaactctaagaatcatagcataatcacctcagaaggaacagagttaagccaatatgaaatatgccagcttaaggtaggctcatttacaagggcttcagccaatgaaactatcattatagccatgagcattccagaatggagaaattatcaggatgaatatgaaaattatatagaggttcatatcaatgatgaattctattatgtaagggtcaatgagggagttgcctatttggatatcagctttgataagattggccattatgactttaaggcccagttcaagtccaatatatactcatctgatattgtagagtttgattttgaagtagtaaaggattcaatctttgatgttgatgatttggatgcctcaaacccaggaactttcaaggaacttcaggatataattagaaatgctaagaacggttccataatcagtttggataaggattatgctttctctagtggtgatgagtctgttgttgatgattatatagagataaataaatctctaattattgatggaaaaggccatataattgatggttcttctgattcaggcatttttagactaagttcaggtgataatcttactttgagaaacattaagtttatgaatgcagataatggtgcaatagtttctaatggaaatttgacagtttctaattgttatttcattagtaattgtgcttctggttctagttctacttctacttccagttctgattctagttctactgcttgtggaggtgcaatttactgtgaaggcacttgttttatagtgaattctctatttgaatctaattctgcagatgccggtggtgctgtttactgtgaaggcacttgttttatagtgaattcttattttgattccaattatgcagatcttggtggtgctgtttgttgtgatggcagctgttatatagtgaattctctatttgattccaattttgcagtttatggaggtgcagcttccatagttggaaatgaatcatgtgaaattatagattcaaactttattgaaaatgaggccatctatggcggtgcaatatacttagaaagctattgttatcttttagattcaagtttcaattataattatgcaaacaatggaggcgccatttattctatagctgaccttgacattcataccactggctttaattacaatgaagcctataaggatggaggtgcaatctatcttgtaaacagcacatcctatatcaatgaaggaaatttcactgaaaacagtgctaaagagaggggcggtgcaatatgcgcacttgaattctcaaatctaactattagatgggcttatttcatggataactctgcttcaaagtatggaagtgcaatcttttcagtaaatgcccttaacattacagattctgaagtgactgtaagttctggtaaggtggaacttatctgctttgcttatgattatgcttcaaatggccaggcatatggagatttatactttgatgaaaatagcttttatatcagtggtgctcctgagatttactacttcagagaaaagatagctcataaattagccttggatcttgagttcaataatatagagcttatcagaggaggaggcgttgagatatccagggacttgaatgatgatggctgggaggataaaatcaataacaatatgcttgagatatgcagattggttgatgacgatgattatatgactgtccttagaatgaaggagatagaagtgattctaataaacaagaacaatagatctgacattcaaaagtttaagattccatttaatgtcaagcttaatggctatttccttaacacttcttcattgaagtatggctcttatatccttactggaaatctttctaaggatcttgcaagcaattgtattgtaaagaatggaactttgaaagttttaaggaaaactaccctctcttctctgtctactttcactaaagtttatggaaatagtaagaatcttgtagttactttaaaggacagtagtggaaaagctatagttggtgttaatattgctgttaaattgaatggaaaaacaattaaagcaaagactaattcaaagggtcagatttccatagccattagtcttaagccaaagacatatactgcatatatcagctttgcaggcaatgactattatgcaagcgcaagcaagaaggtaaaggtagttgttaaaaaggcaaaccctaaattgactgcctctaaaaagacctttaagttaaggaatgctaaaaagtatacagtcactcttaagaacaaccttggaaaggcattgaagaatgctaaggtcactattaaggtggctggaaagacttataccgctaagactaatgccaaaggtcaggtaacattcaatttgaaattggctaaaataggcaagttcaaggcagttgttagctttgcaggtaataagctttataatggcttgaagaaggcggttgttttaactgttaaaaag

SEQ ID NO: 16720 - DNA, 4068 bp, synthetic construct
  source 1..4068: mol_type = other DNA
accatatacgaattcacaagcatttatgaatacgcctctttaaatgacacttacattgacggcatagtttccaccaaaatcccttacgccttggaaaacattgaactttatgtatccgatggcagtggcgatgatgaaaatggaaacggcagcataagcaatccatttaaatcaatttccaaggcattgagcgaaggatatcaaaaatcaacaaatattacagtgcatattttggaaggcacttatacaggaagtttaaacagcaatttaagaattccaacaactgttaacatattgcttatcggcgaaggggcagccaagaccataataagtgacagctcctcagactatttcattacagcattaaaaggcaaatgcgaattaagaatatcccagatgacattgaatagggcggcccgtgacacacaatcagccatctatattgaagaggaatccaatgtggccattgacaatgtcacattcattggcggccaaggaaattacggcggagccatcaatactgcaggaaacctttccataagaaattcatatttccatgacaatggatatgcagatagaactttacgtgcaaatgcctattacggaggagccatttgcaatgacggcaccctaatcattgacaatacaatatttgaaagcgaccatgcaggcagactaagtgaaattgcgaatcaaggcacattatacatgaacaattcaaaagtgattgacagcataaacgcatatagcataaacatggatttggttgctatcggcgcttatggtggccaaaagggcgaaattacaatagaaaatagccaattcatagttagctccaagaccatcaatgaattgaatgacagaatctatgatcctacaagggcattgacctgcttgggcattggttcatgccaacatgcaatcctcatcaactccacattcattggcgaaggggcagtattctccccttatgtatttggcggaattaactcaaataatcttgcaagtggaggatgtaccatgattccaggagatttggaagtctacaattcaacatttagaaatgtccaagctgtaaatataatatattcaagaacagataatgtgagatatcactcccaaagggtctttgaaggatgcctattcgataatgtcgaatatataatagctgttttgaatacaggcaatttttcagttgagatgcatgactgcgttattttatcagatgatcttgctaaaataggatttggaagtgaaaaaaccatgaaaatggacatttccaataactggtggtcctccaacgatggaagctatgacaatgccaccctaggaactaccaattacatttcaaattgtgttgtaaaactcaaggaaataagttcagagactgttcatcctgaaagctatctgatcctaactctaaattcaagcaatagaaccggtctgctacaggatgcaatcctggcattcaaggcatacgacggcgaaaacataagcgattacgatggagctttatatcctcgaaatttcgaaatgtctgccataaatgccactttagatgacctggagggcacaataattaacaaggccatcaatccatttgagggtgtagaaaacagcggatattacattgaagccattgtagacaatcaaaaggtcaatctgacagtccatgacagcctatctatcggcaacgcatacattttagctgagaacatttcaatcaactacaatgaaacacaaataaatgtcactgttttggaagagaacggcaaaagagcggatggaggaaacgtttcattgaaattgcatgataaaacctatatatccgaaatcattaacggcactgccatattcgatatagatgtccttcctaaaggggattacctattaaattattcattaaatcgtcctaaggtttatcacagcatttccaactcatcaaatttaactgtcattccatttaaaataaatgcttacgccaatgccagcaatatcaaagtgggagaggatgcaattgtcatagcctatctagataaggatgccggaggcaacgtcactttaggtgaggaaatccaaaaagtcaatgatggaactgccactttcatcatttccaatttggccaaaggggattacacttaccaactaagttattccggagatgaaaaatacgataatgaaacattccatgtttcattctctgttaacttgaaggatgctagcatcagcgttgagaatgacactttggacttgtttgttggctccaatgaaaccattgttgccactatctctccaataggacttgccgtaaattacagttgcagcaatgaatctgtagcaatggttgatgaaaatggtgtcgtcagtgcagttggtgcgggaatggctgtaattaccttgactgtcggtgatgatgtaacttatagcaaaaactctagctctgtcactgtcattgtcagtaaaatcccaaccatcattgagatagttaatgataccattagcttagaagtcacagacagccttgattccattgcaagtttaaatccagaggagggaggcaatttaaactatgcaataagcgatgacttgattgctaagattgacaatggccaaattactgcattaagtgaaggcagtgccattataaccgtttcatttgatggcaatgacaagtatacaaaagctcaaaacaaaagcatcaagattattgttaatcttaaagaggccagcgttagcgcattcagcaatattgacttgctggtgggtgaaaatgataccctttctccaaaaacctcccctgaaggattagatgtgagatatgaatctaacgatacatctgttgtgcttgttgataatggccaagccattgctgttggcgagggcaatgccaccattacattgactgtcggcggcgatggagtatatgcagaaaatacaacaacagtgaaagtcagcgtaagcagaatagctaccatgattgaaattgaaaaagataccattgaattaaaagtcaatgaggaatccccaatcggagctatattggagccggatgttggcaatttaacttacagcataagtgatgaaagcattgctaaagttgaaaacggcaagataattgctttagctgaaggaaatgcaagcctaagcatttcatttgcaggagatgaaagatacattggaacaaatgcaagtgtggagattagagtaaataagataaacacaatattgactgaaacagacataacaacaacctacaaagaggagggctaccttatagcaacactgaaagacagccaaaataatccaataagcggagctgtactgactgttgacttggatggaatcaaaaactatacaactgattccaatgggcaaatcaagatagcgacaaataatctgattccagacacttatactgcaagaatcagctttgcaggcaatgaaaactacagctcatctaatggaaatgcaagtgttaccgttaaaaggataggtacaaagcttaatttcaatgacatgaacactaccgcctttgattccaatatagaaggaagaataggagaatatttctatttccaattagttgactgcgatggaaatccactagccaacaaaaaagttatcataggattcaatggagtcaaatacaataggcaaaccaatgaaacaggatgggcaaagatacagatcaacttgaaatatgccaattcttacacctttgcaatagcattcctaggagatgacaactatagcggatcattcaactttgcagtaatacgcgttagccaacagacccctaaattaactgcaagtagcaagacctataagtcaagcgcaaagaccaagacactgactgccacactcaaatcctctagcggaaaagccattgcaggtaaaaaaataagctttagactaaatggtaaagtctatacagcaaataccaattcattgggagtggctactgtaaaggtctctttaaacaagaagggaacctatagctttacagcgcaattcagtggtgacagcacctataagaaggttactaaaactgcaaagctaacaataaaa

SEQ ID NO: 16721 - DNA, 4530 bp, synthetic construct
  source 1..4530: mol_type = other DNA
ttcgactataattttacagatggaatagtcattgatcgtcctgtgacaattatcggaaatggacatacaataaatgctgctgaaatggtcagaatattccatattcaagcagacaatgtaaaaatcaaaaacattacattcacaaatgccatctcaaacggatacggtggcgctatctactggcaaggagccaatgctaatctttccagttgtctttttgaaaataatagtgctgtaatggctggtgctgtagcgttctatggaagcactggcagtattgtttctgattgcagtttcatgaataattccgccaataatggtggtgcaatcatgtggcaagtcagtgatgacagcgttgtttctgattgcagtttcatgaataattctgccatacagggcggtgctatctattggagcagtaatgatggtgttgtttctgattgcagttttgtgaataattccgctgtgcgtaatggtggagcaatatattgggaaaaaaataatggtaatgtttccggctgtatttttgtgaataacagtgctgataacggtgccatctatttcaataatcaaaactttggtcaaaatttaacaatcaatcataatattttcctgaacaatgatgccgttgcaatctattttgtgagaaatgattccgcttccaatgcagattacaactggtttggaaataatgcaactaattgcgatatagcgccaacaagcaataatatggaaatgaatacttggctgttcttgaatgctacatcagaaccggaaggaatttctattcttgattcatgcgacattatatttaaattatatgcttatgctccttctggagtatcagaatatgatagcagccgtttgaaagagattaacttaacagtgactccaactaacggaaggatcaatactacccaagccaaactgggagaaaaggttcactacactccagagagtgccgaatgcatgctaacagcatcaatagaaaatgccttctacactacaagattaaaaatctcagatggaacaacattccgtgacttgaacaatctcataaaccgcaacgataatgacactattattttggataatgatttcatctataactcactttttgacagtaaatttaaaaatggaataaatattaatcgacctttgacaattgttggaaataattataccatagatgctaccggaatggcaagaatattccgtattcaagcagatgatgtagaaatcaataacattacattcgctaatgctaaaatagacggcaatggtggtgctatctattggtattccggcgctagaggtattgtttctgattgcagttttgtaaataattcagctaagatgtatggagctgctatctattggaatggtgctaatggtaatgtttctgattgcagttttgtgaatagcactgttactgatgaacatggtggtgctatctattggcacggtgccaatggagttgtttctgattgcagttttgtgaacaattctgctaagaaatatggtggtgctatcttttggaacgctgccaatggagttgtttctgattgtatctttgtgaacaattctgctaagagctatgatggtggtgctatagtatggaatgaaggtttgaacggtgctatttctgattgcagttttgtgaataattccgccaatgatggtggtgccatcttatggaatgaagctgctggcggtactgtttctaattgtagttttgtaaataattcagctaataagagtggtgctgctatctattgggattccggtgctaggggtgttgtttctgattgcagttttgtaaataattcagctaataggagtggcgctctatactggtttgctaatgatggtgttgtttctgcttctatttttgtgaataacagtggcgataatggtgttttatacttcaataatacaaataagcgaaatttatcaatcaatgacaatattttcctgaataatgatgtcgttgcaatatattttgttaatagtgattccacttccaatgcagattacaactggttcggaaataatgcaagcaattttgatactgaaccattaactactaacgtggaaattagtacttggctcttcttgaatgctacagcagatccaaatccagttgaaattttaaattcatcagatatctcatttaagctatattcatataacgctacaggaatatctgattatgacaatagccagttacagcctgttaatttaacattgactgcaactaagggtgatgtcgatagcattgctaaattaggggaaactgtcatatacaatccaactagtttaggaactggaagcgtaactgcaaaagttgaaaacgtcgcatattctattgaaataaacaatataaaatcaaatccaaacctatcagttgaatccgatgaacttacatacggcaacaacatagcaattgctcttaattatgagtctgctgctaccggcaaagtcaatataacattaaaaggcaaaaaatcagattatacatttgcagatttggatttaaatgaaacaatttcacttggaattcttgctgctgatgaatatgaggtcattgttgaatattccagagatgagatttataccaatgcaagcgcaaggggaactttaaaggtcaataaagccaattcaacattgacagtcagtgatattgaatttgattataaggatatgggatctggtgaaatatcattcactaacgcaactggtgttgaggccaaagtaataaatcatgatgaagccattgttttcgttagaggaaatactataactgtattaaatttaagtgcagacagctatatattggaagtaacaactattactgatgaaaatcacaatgaggtaagcaagaatgcaacaataacagttagaaaagtcaattctaccattaatgttaatgatattgtcctttattatggcgaatccatcaaccttgctgtaacaactgatggtgctattggaatatctgctgatatcgatggcgagaacgttgagcttaatgaaaacatcgttacaattccagatgatttggaatctggaaatcacacattgaccataacaacagttcctaatgacaaccataaggaagcaagcaaaaccgttaatattgttgattgcaggattggcaatatcactgttgttgttgatggcgttgaatattctattcctgctgtaaatggcactgccattacaaccaatatgccggaggagattgaaaagcttaaagaaaatattactgatttaactggtcaattggaagaagcacaaacaaacgcaactaacctggctaacaatctaacaattgctaatcaaatagttgataaattaatcgcccaattggaagaagcacaagccaatgctactcaaacaatcaatgatttaactcatcaattgaatgaagcccaaaccaatgcaactaaaatagctaacgaccaaacaaatgctaatcaaatagtagacaatctaactggccaattaaatgatgcccaaaccaatgcaactaaaatagctaacgacctagaaaatgctaatcaaatagttgatgatttaactcgccaattagaagaagcacaagccaataatgatcaaaccatcaatgatttaactcatcaattggaagaagctaaagttaatgcaactaaaatagctaacgacctagaaaatgccaatcaaacagttgacaatctaacaacccaattggaagaagctaaagttaatgcaactaaaatagctaacgacctagaaaatgctaatcaaatagttgacaatttaactgaccaattagaagaagccttggctaatgctactaaaatcgaaactgttgttgtcgatggtaaagaataccctatagaatatgtgaacggcactgcaacagtaactaccaattctacaggtcctcaaaacataactcatgagagaaaagccacccaaatcatttataaggatatggaaacaactgctatcgacactaaagttgatggacgtatcggcaaatacttcaatgtcattctcaaggacagtgagggtaatattttagcgaataaacctattcaaattggattcaatggtaaggtctataataggacaactgatgaaaatggatctgctaaattacaaatcaacctcatcaaagcagacatttacacatttgctatatgctacctcggcgatgatgattataacggttctttcgttgtatcaaaaatcaccgtaaaagcgcaaaaaggcactctaaccgttccaaacaaatcttacaaagcaactacaaaaaccaaaactttaagtgcaacattcaaggcagcaagtggtaaagtacttgccaataagaaagtttcattcgttgtgaatggaaaaacttattctgctaagaccaacgccaaaggtgttgctactgtaaacgtcagtttgaataagaaaggaacatatagcttcgttgccaaattcgctggagacaatacatacgctgcagtaagcaaaaaagcaaaattaacaataaaa

SEQ ID NO: 16722 - DNA, 4380 bp, synthetic construct
  source 1..4380: mol_type = other DNA
tcacatgttgaggtagatggaatagacattaattacactgatttggaaaccattacagttactgtaagcgataataatgccactggatttgtaaccattacaatcaacggcactgatattgaattaactaaagaagtttctgcaggtcaagctgtatttgatgtaaaagacttggttgttggagaatacaatgtaactgctgtatatcacagcgatagaaactacttgaacagcactgcttccgatacattcaaagtagataagtcagatgtcaagaacatgaccataagtcctgtaaacattacttatggtgaaaacgaaacaattactgtaagaatcactgataataatatcacaggcaatataaccatttctgtaaatggcactgaatatggtcctgttgaacttgacaatggtgttgcagtctttaatgttcctggattgattgtaggtgattatgaagtaactgctagctatagcggcgattccaactataatcctgcaagctcaaccgagacatttactgtggataaggagaaaccaaatgttcatgtggtctctgaaaacattgactatggaaagaatgagacaattactgttattgtagatggatttaatgtaaccggcaatgttaccattaagattaatggcacagagatagcaactaaagaaattaatgataaaggccgtgcagtatttgttgtacctggccttcaagccggtgaatatgaagtagttgccatatataacggtgatgataatcatgaatcttccgaaggcagtgatacatttacagtagctaccgtcactccaaacatggatgtggaaactgaggacatcgattatggcgacaatgagactataacagtaacccttcctaaagatgcgaaaggtagtgtaaacataaccattaccgatgagaatggcactgttgtttatgaaggtgaagctcagcttgaagatggcaaggctactgttgacgttccaggcatcacaccgggtccatacaatgtaactgtcaagtatcctggagacagaaactataatccaaccaataagacagtcagattcaatgtagataaggtagttcctgatgtcgatgtcgatactgttaatattgattatggcgacaatgagactgtaactgttacagttaaccctgttgatggtggcgtcactcctacaggtagtgtaaatgtcactgtcagagattctgatggtaaagttgtttatgaaggcaatgtagatcttgttgcaggcaaggctacccttgatgttcctgatttaggtgcaggagattacactgttgatgtacgctatggcggtgattccaactacgatgattcaactggaggctcaagcttcaatgtagctaaagtctctcctgatatggatgtgcaaactgaagacattgattatggcgacaatgagactgttactgtaacccttcctaaagatgcgacaggcactgtaaatgtaaccattaaggataatgacggcaatgtcttttatgaaggtgaagctgagcttaaagagggcaaggttactgttgatgttcctggtttgcctgctggcgattacactgttgatgtagcctatggcggtgatgataattacaacccagtcaatagttccgatagcttcagcatagataaggtaagtcctgaagtcgatgttggtactgaaaacattgattatggtgacaatgagactgtaactgtcacagttaaccctgttgaaggaggatctgctcctacaggcactgtaaatctaaccgttaaggatagtgacggcaaagttgtttatgaatgccaagcagaccttgttgaaggcaaggctactgttgatgttcctggtttgcctgctggcgattacactgttgaagttgcttatggcggtgatgagaattacactgctacaaactccaacggaaactttgctgtaggtaaagttaaccctgatatggaagttgatggtgaagacattgactatggtgacaatgagactgttactgtaacccttcctaaagatgcgacaggcactgtaaatgtaaccgttaaggatagtgacggcaatgttgtttatgaaggtgaagctaagcttgatgatggcaaggctactgttgatgttcctggtttgcctgctggcgattacactgttgaagttgcttatggcggtgatgataattacaacccagtcaatagttccgatagcttcagcatagataaggtagctcctgaagtcgatgctgacactgaagacattgattatggtgaggatgagcctataaccgtaaccattgaccctgttgaaggaggttccactcctactggcactgtaaacgtaaccgttaaggataaggatggcaatgtcgtttatgaagaccaagtagatcttgttgatggcaaagtcaccctagacattccagatttagatgccggcgactacactgttgatgtggcatacagcggtgatgagaattacactgctagaaactccagcggaagctttactgtaaacaaggcaaaaccagaattgaatgtagattcagaagacattgattatggtgatgatgaaaccattactgtaagccttccagaggatgcaacaggcactgtaaacataaccattacagataaggacggtaaaaccaaggtattcaatgatgttcctattgaaaacggcaaggctacaattagcgttcctgatttggatgctggagactataatgtaacagtagactatccgggagatgataattaccttggctctaaagctacttcaagctttaaagttgtcagatcaaacagcaatatcactcttgagactgagaacatcacatatggtgacgaagagcctataactgttgatgtaaatccagtggaaggaggagtcactcctaccggtactgtaaacataactattacagataaggatggaaatactaaagtattcaatgatgttcctcttgaaaacggcaaggctactgtagatgttcctgacttggccgctggaaactacatagttgatgtaaaatactccggtgatggcaattacgatccagatagcactgaaggagcatttgaagttgcaaaagcagttcctcacattgaaattcatgtatatgacatttactatggcgatgtagaagtgctcactgtcacatgcgatgctccaggcactgtggacatcactgtaaatggagtcactgtaacagtacctcttgatgacggatatgataagcgtgtattcagttcaattgttagagcatacagcggcaaggcaactcttgaccttgtaaacttggctgttggcacataccctgctaaggcagtctataacggaaatgaaaactacacttccgtcagcgacaatgacactttccatgtatacaaggagaataccactaccaagatatctgtagatgatatcaagctaggtgaagatgcagtgattgatattgaagttacccatgaagacggctctgaaaagatcaatactaacataactgtaactgtcgatggaaaagattatactgttgagctcattgatggaaaaggcactttaaccattcctgatttggatcttggaaaacatactgtcaaagcggtatatcctggaagccacaactacacaaacagttcaaacgctaccagctttaaagtgacaaaagttactccaagcttcgatatttcaactgaaaacatccaagtcggagatgatgaaaccgttactgtaactcttccagatgatgcaacaggaaccgtaacccttaccattgacggcaaagaatatactgctacagttgaaaacggcaaagctacatttgttattcctggcattaaggcaggcgaacataaggtcaatgttgcatatagcggtgatgacaagtacgcccctgctaaaagaagcgacagctttacagtaagcaaggttaaacctgatatgggcatggacgctcctgaaatcaaagtaggccaagacggcgttataaccgtaactgttccagaagatgcaacaggtacaataagcattaccgtagatggcaagacttacactgcaagcattaaggatggcaaagcggtattccatatctctggattaggtccaggcacacatattgtcaaagcctactactctggtgacggcaagtacttggctggctctgttgatggaaccattgttgtagagcctaagaacggtacaagcccacaagataagggcaaagctcatggtggtattgatttagaaagcaaaaagaccggtaatccaatattagtattgttcatggtattgttcagcttaattttaatacctataaaaagaagaagagatgatgatgaagaagaggaaaatgaagatcaaattaatcgtatagat

SEQ ID NO: 16723 - DNA, 4662 bp, synthetic construct
  source 1..4662: mol_type = other DNA
aagaccgttactgtaattggaggaataggccaagtcaatttcggcagcctagaaaccgacacctatgaagctacagtatccttcggaggaagcgatctctatgagcctatctcaaacgctaccgaatttacagtatatcctgaagaggaaggcaccaatttcgagattgatacaaatgcaagcgaaatcacatacggcgcaagcatcaaagtcactcacaaattgcctgaagatgctacaggaaccatcaaatattacctgaacaacggcactgtccttggagaactgccggtcgaagaaaaactgacactggaccttgatgcaggatactatgtaatatttgcaaactattcaggcgacgaaagcttcgagcctgactgggacagcgcagatgtcctcgtaaagcaagtagaaacagaattccatataggcctccagcagcaggtcatatccggcaaccctgcctatgtcacccatagcatatccgagggcgctacaggcacaatcagctactatctgagcaacggaaccttccttggagaagtgcaggtcggcgagacatatgtttcacctaaatggaaggtcggaatctataacataaccgcaaactattccggagacaggaactttgttccggcatcagacagcatggaattcagaatcaatcctgacttctcgttcgacatataccttgacgaagacgacgtcatatacggccagaccactacagtacgtccaagcttgccttatgacgctacaggcaccgtggaattctactataacgacacatacctgggcaaggtaacaataggccaatatgaaatcataatggttgacggagaggaatactacgaaactccaggagtggagcttcctgaattcgacgtgggagtccatgaaatcgtaggaaaatacttgggagacaagaattatgaccctgcaatcgcaaacgtaaggcttactgtcctaagtaccgaaacagtattcgagatcaatgcaagcccaagcgaaataaaatacggagaagctgcagctgtcatccataaactgccaagccttgcagtaggtaccatcttatattacctgagcgacggaacatccctcggcgaactatactactacgaggaccttgcattgcctaaattggctgtgggaagctatgagattcttgccaactattccggagacgaaaacttcaacaatgcaagcgcaagcacaaccttgacaatcaataaggcagaccctgatttcgaaatctatatcgcattcccttcctatgacttcggagatagccctgtagtcttcgttaacttacctgacgacgctacaggaaatatctcatactacctgagcgacggaaccttccttggagagcttccggtagacgaaaggctgtccttgcctatactgaatgtaggaacacatacaattataggaaactattcaggagacggcaactacaacaatgcaagcgcaagcatgacagtgactgtaaatgaggtatccatggaattcaatcttggaatcagcgcagaagagataagctacggcgaaactgcaacagtcacccacagactgccaagccttgccaaaggaaatataacatattatctgagcgacggaacactcctcggagagcttccggtcagcgaaaacctgaccttgcctaagcttgatgttggaacatacattataatcggaaactactccggtgacgaaaacttcgacggagacagcgcaaatgtaacattgacagtcattcaggcagatcctgcattcgcaatcagcataagcgcagaggaagcggcatacggcgaaacagtcacagtcagcccagcactgccagaagatgcaacaggaacagtaatatactacctaagcaacggaacaatactaggcgaacttgcagcagacgaaaacctgaccctgccaaccttcgatgtagatgtctatgacattttggcaaactattcaggagacaagaactacctcaatgcaagcgcagaaacagcactgattgtaagccaggcagaccctggattcgaaatcagcataagcgcagaggaagcagcatacggcgaaacagtcacagcaagccctgttctgccagaagatgcaacaggaacagtgatatactacctaagcaacggaacaatactgggcgaacttcctgtagacgaaagcctgaccctgccaaccttcgatgtaggcacatacacaatccttgcaaactactcaggagacagcaactacctcgatgcaagtgcagaaaaagagctgaccctaataaaggcagactctacactggaaatcaatgacatagcctttgactacagcaagacaggctcagccgaagcaaagacttcaggcgcagaaggaatcgtcgcttcagtggcgggccatgacgaagccgtcgtcgaggtaaacggaaacgagattacagtatccggacttgatgcaggcagctacaccctaagcgtttcaacaatcgtagacgacaaccacaacagcgcaagcaagaacatcacagtaacagtcaaaaagatcgattcaagcctttcagtcgaaggccttgagctggactatggcgaatcaggcaatgttgatgcagcagctgaaggagctaccggcatcagcgccaagatcggaagcaagagcattggagtaaacggatattccatccctatttccggactggatgcaggcaaatacaacctgacagtgactacaatccctgacaggaaccacaaccctgtaacaaaaacagcccagatcactgtaaacaagatagattccacattggaagcaaatgacatggcattcgactacgagggcaccggcacaagttcagtgacatacaccggcgcaaccggcgtaaaggcttcagtaatcggacagccaaatgcaaaggtcaatgtaaagggcaaggagatttccgtctcaggattggatgccggaaactatactctggaaatcactacaatccctgacaagaaccacaaggctgtaagccaaacagtcaatgtcacagtcaacaagatcgattcaaagcttgacttcaacaaccttgtagactacggatctgcaatgaacgttaccgtaaagaccgaaggggcaagtggaataatggctgaaatcgacggaaaggaactcggcgtcgacaagtacacaatccctatctccgcattggatgcaggggaatacgaccttacagtaacaacaatccctaacagcaaccacaatcctgtcagcaagaccgtcaaggttacaataaccaagcttgactcagaactggctgtcgaagaccttgaattcgactacaacagcactggaactaccaatgcaacattcgaaggcgcaacaggcatcacagccaaagtcgtcggccagccaaacgcaacagtagagataaatggcaattccatatcagtttccggattgaagcctggaagctacaccctggaagtcactacagtccctgacgaaaaccacaaccctgttacagcaaaatctgcaataagggtaaacaagctggagaccgcaatttcagccaatgacataagcacagtccacggcgcagacaagaacctgaccgcaatcataagggacatcaacggcaatcctgtagccaacgccacagtatccgtcagcctcaacggcagcaaaaaatatgtcagcgattcaagcggacagatttcaattcctttgaagagccttgctgcaggcaactacacagctacaatcagctttgcaggcacagagatatacggcaagtcaagcgcaagcatcaaagtggctgtagacaaggagccaacatcaatagctgcaacaaacgtcaatacacagtatggccttgaagactatattacagcagtgctgaaagacggccaaggcaatcctttgggcggagtcaagctgaatgtagatctggacggcaacaggacaatcgttaccgactcaaacggacagatcaagattgctaccaaagacctgacagcaggcaactacattgcgacaatcagctttgcaggaaacggaaactacatggcatccgagtcaaatgcaatcgtcaacatcaacagaacaggcacaaggttcaacttcaagaacatgacaaccaccgcattcgactacagaatcgaaggaaggataggaaaatacttctacttccagctagtcgacgaggatggaaacccattggccaacaagaacgtatgcatcggattcaatggagtcaagtacaaccgtacaaccaatgaaaccggctggaccaagctgcagatcaacctgagatgcgtaaacctgtacacctttgcagtaacattcagcggagacgacaactacacaggcgcattcaatgtagccatgataaacgtgacacatcaaagccctaaattgactgcaggcaacaagagctataaggccagcgcaaatacaaagacattgactgcaaaattcaagagcttcaagggaaccgctattgtaggcaagaagataacctttactgtaaacggcaagaaatactcagccataaccgataaaaaaggaattgcaactgtaaacgtaagccttaacaagaaaggaacttataaatacactgcagcctttgctggagacagcacatacaagaaggtgagtgttacttcaaagctgactataaag

SEQ ID NO: 16724 - DNA, 5781 bp, synthetic construct
  source 1..5781: mol_type = other DNA
atcaatggaaacggttttacaataaacggttccaacaaagcacccatatttcatataaccggggataatgttaccatcaataacattagttttgttaatggatatgcaaatgcatatgtaaatggctatgatggtgaagatatgaggggtggtgccatctactggcaaggtagaaacggcaaggtaacatactctaacttcaccaacaacaatgcaaatgatggtggtgcaatttattggtttggtacagatggtattgtagaatattcaaatttcattaacaacaatgcaaatgatggtggtgcaatttattggtttggtacagatggtattgtagaatattcaaatttcattaacaacaatgcaaatgatggtggtgcaatttattggtttggtcaaaacggaaatgtcgaaaattccgtcttcacccaaaatcatgctggctcttatggaggtgcgatttattgctctggtgctgagagtattgtagaatattcaaatttcaccaacaataatgcatataatggtggtgcaatttattggtttggtcaaaacggaaatgtcgaaaattccgtcttcacccaaaatcatgctggctcttatggaggtgcgatttattgctctggtgctgagagtattgtagaatattcaaatttcaccaacaataatgcatttaatgggggtgcaatttattggtttggtcaaaacggaaatgtcgaaaattccgtcttcacccaaaatcatgctacctttgctggaggtgcgatttattgctctggtgcagagagtattgtaaaatattcaaatttcaccaacaacgatgcaattaagggtggtgcaatctattggaatggtcgaaacggaaatgtcgaaaattccgtcttcacccaaaatcatgttgacaatgatggaggtgcattatattgggatgatagtgaaggtaaagtcacttcttgcatatttgtaaataatactgctgaaactaagcatagcggacatcttattttgcctatgggaagaggtggtgcaatctattggaatggtcgaaacggaaatgtcgaaaattccgtcttcacccaaaatcatgttgacaatgatggaggtgcattatattgggttgatagtgaaggtgaagtcacttcttgcatatttgtaaataatgctgcagatgttgaggccagcgtatattataatgaacggggtgcctattccaattttagcaataacattatgttaaataatggaaaaaacgaaattaaattcaagatttttgatcgctcaaatatagattataattggtttggaaataatctaagcaattacaatgaaaaaccaggaggttttgagggcaatatttggctatttttaaatgctacagtagaccctaatatgctcttacttggtgaaagttctgaaattacttttagattatatgcctatgatggaacaaatgttattgaatatgacaatgatttaatatatcctattaacttaactttaatttcatcaaatggaaacatcaatgaaactgtagggttggaagaaacagcaatattcactcctcaaaatgtaggaactgccatagtaactgcaaaagcggaaggctttgacatccaaacagtatcaataaatgttcgtgcagcaagcttcagtgacttaaacagaaccataaatggcaatgaagatgctgaaataactttaggaaaatattatgaatttgatccagaaacagatggtgctttcatacatggaataatcattaaccgcacagtgacaatcaatggaaacggcactacaataaacgcatcaggcaaagctcgtatcttccaagttatcgctgataatgtaacactcaataacattacatttacaaatggaaatgcaagcggcgagggtgctgataggagtggaggcgctatccgttgggaaggtgcaaatggtattatatcatactccaatttcacctttaaccatgcatacctaactggaggggctattatctggtccggtgaaaacggtactgtcaaacactccagtttctctcaaaatgatgtagatggttctggtggagctattaggtgggctggtgcaaagggcactattacagattccgatttctatctcaacagtgcaacagatgcaggtgccatctggtggcttggtgcatatggtacagtcaaatactccaatttaatcaacaaccatgcaggtagtcgtggtggagctatcatgtggagtggtgaaaacggtaatgtgacatactccaatttctcactcaataatggaggaagtggaactgggtatgatggcggtggcgctatcttttgggatcatttaaacggtactgtgtcatattccaatttctccaacaaccacataaatggtcatggaggagctatcgcttggcatgaacaatatggaaatgtatcctcttgcttatttgtaaacaacactgcaactgacggcgctagcgtataccataatgatcattcagaatcatattccaatttcaacaacaacatcttgctaaacaatggggaaaatgagattcattatgatgtatatgatggctccaatgcagattataactggtttggaaacaatggaagcaattacaatgagaaacctgcaggcagcgttggaaatgtatggcttttcttaaatgcaacagccgatccaaacccaatatctattttaggtagctcagatgtaagctttaaattatatgcctatgatggattagaccttattgaatatgacaataatctattatatcctatcatattaagcctaagctcatcaaatggaaatataaatgacactgctggattggatgaaaagataatattcactcctcaaaatattggaactgccactgtaactgcaaaggcagaaggcatcttccaaacactatcaataaatgtttatcctccaagctttagtgacttaaacagaaccattaatggaaatgatgatgatgaaataactttagacaaatattatgagtttaatccagagttggattcagctttcatacatggaatcatcattaaccgcacagttacaatcaatggaaacggaagcacaataaacggttcaagcaaagcacgtatcttccaggttatcgctcctgatgttgtcctcaataatattacctttgcaaacggaaatgcgaatggtgaaaatgaggggggctatggtggcgctatcctgtgggaaggcgataacggaagagtcgaagattcaaccttcatcaacaacaatgcaagcggatacggtggagcaatctttggaggaaactgctcagataatgttattttccaaaacaaccacgcaggcatagaaggagatgactggtatgtccctaaacctgtaatatccgtcaatgacttcacatccacatataaatcaggagagaagctatatgtcaatgtgtcctatgttggtactcaaatagatggaatcaatgttacaatctctgtatttgacagttccaaccaattaattggcaactattcctgcctaagcggtgacggatggactgtagatttggatgctggaaactataacgcattagtatttgtagattcagatgaatatggctatggagaggagacaattgcattaacaatcaataagcgcgcttctcaaatttcagctaacccattgaacacaacatacaatggaaacgaaaacattataatgatccttaaagacaattataatgaatccattgccaatgcaactgttttggtagactttaatggtgagaaaaacctaacaaccgatgagaacggtcaaattgttgtgtccgctaatggaattgttcctggagaatactgggcacagttcatcttcgacggcagcaaaaactatgatgggtcagatgaaaaggttaaagtgattataagtaaggcttctacaagcctaagctcagagaatatgaatgttagctataatgaaagcaaatacctgattgctacattaaaagatcaatattccaatcctttagctgaaatcagcatagaattcaaatctaattcatcaactgttaaaaatgagaatactgacaataagggacaagctaaactcttaattgacttcaacccaggaacttataatattgatatcagtttcgctggaaacagcttatatgatgcctcatatgctactgtgactgtggtagtaaacccatctgatgatagtggaaatggcactgaacctagtggcaatggaagcagtggaaacggtactagtcctgaaggaaatggtacttctccaggtggtaatggaacctctccgagcggaaatggtacttctccaggtggtaatggtacttctccaagtggtaatggtactagccctggtggtaacggtactgatcctggtggtaatggtacttctccaagtggtaatggtactgatcctggtggtaatggtacttctccaagtggtaatggtactagccctggtggtaacggtactgatcctagtggtaatggaacctctccgggcggaaatggtactgatcctggtggtaatggtacttcttcaactgttaaagatactctaataggcattagcacatccacagtcatatatggaaatgatgagcttatcaatctgaccttaacaactgcagacaaaactcctattgatggggtcattgagctaagagttggcaattctatctataatgtaactattacaggtggaaaaggttcaaaggctctttccaatcttactataggaaactacacagtaactgcagactataaaggagattctgaatacaattcatccactgcaagctctagtttcaccgtgagagaccgtatcgaaaccagaatcatatataacaatatgaccactgcccctgtaggtgcaaatgatggcagaataggtaattacttcagagtcaaattggttgatgaaaacaatcaagcactagcaggagttcctatccaaataggcttcaacggaagaatctacaacagaacaacagactctgaaggcggagcaaaactacagataaaccttgcaaaagaggatggatacacctttgcaatctgcttcaaaggagacgacaactacaacgcatccttcgaagtagcaaaaatagacgtaaacaagaaatatccaaaaccaaacagtgcaaattcagagtccgccgaaccagcaaacaaaacacaaaagaacacaagactcgaaacctccatcctctacaaggacatgaaaaccgaatcagtcctaaaagctgaaggaagagccggaaaatacttcgaaatccaactagtagacaacaacaaaaaggctttagccggagttcctatcaaaataggattcaacggagtagtctacgacagaataacaaatgccacaggaggcgcaaaactacaaataaacctcctgaaagtaacccaatacacattcgctatcgcatacctcggagacagcaaatatcaggcatcattcgaagtagcaaaaatcactgtaaacaaacaaaccccaaaaatcacagcccctcaaaaaacatttaaggcaaaagcaaaaacaaaaacagtcactgcaacacttaaatcacaaagaggaacattactaagcggcaagaagatcaagtttacagtaaacggcaaaacctacactggaacaaccaattccaaaggtgtagcaagtgtaaaggtctccttaagcaaaaaaggaacatacacagcaactgccaaatttgatggagatgccaatacaaaggcaaccagtgtaaaattcaaagtaaaaattagt

SEQ ID NO: 16725 - DNA, 4356 bp, synthetic construct
  source 1..4356: mol_type = other DNA
gccattgcaatgtttaccgatgagaagatcagaccggttacagaaaacacagtcaaaggggcagacaatgaaaaagtcaattacactgcagtcgtaagagatgttgacgaccttgttgaggatgctgaagctacaatcactccggatatcctctataacggtaacttaggcaaggacttagcatatcctgctgaggagatcacattctttgactccatcacagtaaacggtggcatttacattgaaatccaaaatgattcaagctaccttgcatctggagctaccaacagaactgacatatggaacattgaagcacctgaagacgctgatttcgtagctggatttgtatatgtggcttacaactgggataagacctctgcaggaatccctgcacttaacatcacattcaatggtgtatctgtcgctcctgttgcacattacagagaccaatccaatatgggaacctatggcaaatatggatacggacttttagtatatgatgtaagcgaccttttagaagcaggggataatgtattcaccttaacaaaagatgctaacatgactgccatctatccaagtgttttggttgcaggctacgaccaagaagtatctgacagcatgaaaaccatttacatgttcaacggcgcagacttattgtccaatgcaaacaacttcttaggaagagttgttgcatctaacagtgttttagacattgaattgcctgatgatgtaattgattgtgcacttggaatatttgcagcaagctctcaaaaaggcgaaggcaatctaatagtaaacggagaaagctttgaagatgtttggaacggatcttccaactcagtccaagcttgcgtatttaacttgacagatgatatcgaagaatccaacacagtatcatttgttgcaaccggaagcactatactagcccttcagcaattcatctttgtggaatacgagcttgtttctgttgacgctaaattaggctctgaatacaataacgttgcatttgctggaaccgacaatgtcttagaatttaacattaccaatgacggaacaattcctaccgcatacaccattgagttctatatcgatggcgaattggcagacactttagaacttgaacttgcaaacggtgaaagcgacagcctataccttgtggacccaaccatcagaccagttgatgaaaccactgtaaacggcgcagacaatgctaaagtcaactacactgttgtaatcacagacaattcaactggagatgtcttagatataatcactatcactccttctgtactctacaacggtaacttaggcaaagacttggcatatcctgctggagaaatcactttcttcgatgtaattacagtaaatggagatatcattgtcataggaatgaatgattccacttatcttggctctaagacaacaggacgtactgacgtatgggacttaaccactaatgaagatattatctttgcagccggatacctttatgttgcatacaactgggataagacccctgctggaatgcctgtatggaacaccacattcaatggcgtaactgtcactcctgttgcacattacagagaccaatccaatatgggaacctacggcaaatatggctacggacttatcgtttacgatgtatctgaccttattgtagctggtgaaaacacattcaccttagaaaaagaaaatggaaccactgcagtatatccaagtacccttgtagcattctataatatgcctgaatccagcacttatgtaactacatacctatacaatggcgcagacttattatccaatgcaaacaacttcttaggaagacttgttgcatctaacagcacattggatatcgattcatttgacaatatagtcggcgctgaccttttagtatttgcagctagcgctcaagctggagaaggtagccttgtcataaatggcgatcttgtagctgacatctggaatggcagcagcaacagcgtagatgcatatgctattgacttaggcaaaaaccctaaggcatctaatgaggtatcatttgttgcaaccggatctaccattctagcattgcaacagttcattgttgttgaatacaatgttccttcagctgaggcaagcctcgttagcgaatattctaatgttgcattcgctggaaccaacaatgtattgcaattcaacttaacaaacaacggcgctcttaacacttcttacattgtcgacttctatattgacggcaagaaggtaaacagcactcaaattgcactcaactctggcgaaagctttggccaatactttatcgatgatacaatcaggccagttgacgcaagcactgtaaacggcgcagccaatgctaaggtaaactacacagtcttagtcagcgataaggataccggacttatattggatgaagtgaccctcactccttctgtattatataacggtaacttaggcaaggacttagcacatcctccagaagaaatcgtcctatttgacacaatcactgtaaacggtgatgtgattatagatacattagatgattctacctatcttggagctaagacaaccggacgtactgatgaatggaacttaaccgttccttcagatgctgatttcgaagtggcatacctttatgttgcatacaactgggataagactgcaagtggaatgcctgaatggaacaccaccttcaatggtgtaaatgtcactcctgttgctcattacagagaccaatccaatatgggaacctatggcaaatatggatacggactttacatttatgatgtatcagacctcattaaggcaggtctaaacacattcaccttaggaaaagaaaacggaactacagcggtatatccaagtactcttgtagcattatataatgttaacgagtcaaatgtacttactaccgtttccttattcaacggtgcagacttattatccaatgcaaacaacttcttaaacagaactgttgcaagcaataatgtcttagaattagatttcactgtatttgatgaaatcctatccagccaactctatgtatttgctgcaagcgctcaagctggagaaggaaaccttattgtaaacaatgaaacattcactaatgtctggaatggaacttctaatagcgtagatgcttatattgttgatttaggaaatgaccctagcttatccaatgatgtatcatttgtagctaccggttctacaatccttgcattagagcaatttgtcgttgtaaaatccaaatatcaaaccagctctgacttgcaaaaactcatcgatgctgctgaacctggatccaccttggatttaggtgacaacgtattccaagatgttgctaatgtagtaatcgataagaacttaaccatcaaaggcggttccataatgggcaaagctggagagaccatctttgtaattccagcaaaatccgctaacggtcctgatgaggtaaacataactggcgttgactttattgtggaagatgcaaatgtaattgttcaagcaactgctgacaatggaagcagcccaacttcaatcgacactccaaacatcagaatcagtgacaacttcattgacatgatagacggaagcgttgtacctgaatcagtaactgtattgaaacttgacagcgaaagaggagtccttgcacctaccggtgaactcaaggtcactgacaacgcaattgcagctggaatcaaaccattcgagtttgatgtaactggcgtatccaacggcagcgacaccaatattccagaaggcggtaacattcctgctaaacaggcttctgtaatccactatcaagatatggaaacaactgctgttaactctaagattgaaggaagagtgggcaaatacttcgaagtcaacttgacagacacaaatggaaacccattagcaaataaatttgtccaaataggtttcaacggtgtagtatataacagaacaacaaacgaaaccggcggagtcaaactccaaatcaacttaggatacaaaggaacttacacctttgctatctcctaccttggagatgactactacaacggtagctttgttgtatctaagatcaaggtaagcacacaaaacaccaagcttactactgctgcaaaaacctataaggcaagcgctaagacaaaaacattaactgcaacactcaagtcaagcgtgtacaacaaaccaatcaacggtaagaaagtaactttcacagtaaacggcaaatcctactcagcaactacaaacgctaaaggtgtagcaactgttaaagtaagcctttcaaccaagaaaacctacagtttcacagccaaattcgctggagacgatatgtacaccaaatcaagtgttacaggtaaggtaactataaaa

SEQ ID NO: 16726 - DNA, 6801 bp, synthetic construct
  source 1..6801: mol_type = other DNA
ttagaaccacaaaacttcacagtattcgaaaacccatactctgaattagaagtaactgatgacggccctattgcatctggtgaaactgtaaacattacagctaccctcactgacttccaaggcaaccctatagaaggagctaccttagaagtatatgatactggcgtatggattgctaatattactaccaatgcagaaggtattgctgaaacttctattgataatttaggatatggtcttcacgacattactgtaatattcaatgacactgtacacgatgtccaaactgaaaccgtaactgtatctgtaactcctaagaagggtactttcacagacttgcaatacttaatcgacactgctgatggaagattagtcttgccatacgacttcgcatttgatgcagcttatgatgaacaattcttcttaacaggtgtgcttgtagacgataacattattatctctggcgctggacatatcattgacggtatgaaaaaagcaagaatcttatacatcaatgctcctaatgtcaagatattcaatgtaagctttgtcaatggtaaatctgatgtaggtgctgctatttacaccgaagctgattacttacttgtagacagctgttacttcgcaaacaacgaccctgaagctggtgctgcaatctatgctgaaagcggtgtaactgatgtagaagaaactatcttcttcaataacactgctgtaaacggcggtgccatatatgttgaatccggtgctacattaaacgttgctgattcagaatttaatcaaaacactgcaacctaccgtggtggagctatttggtctaatggtactgttaatgtaaaagattcatcatttgataaaaatgatatcacttacagagttaaaaacgatgataatggtggagctgccatctttaacaatggcactttgaatgttgtcaattccagatttacaaataaccttttaaactatgtcataagaactggagatgataatcatcctgaattagttgacggtgttattttaagctctggaaaagctaaaatcagcaattcccactttgaaaacaacagcggtacttatggttctgcaataactgctttacctataggcactgaactcagtgatttaactgtagaaaattgtgaatttataactaacttagcatactgcggtgcagctatctatgtaggtagtggtactacattattctacattaatgactgtgttttcataggcaataatgctacaggtgtcggcagtaacggatatgttgctactggtggtgctattaagatagctaagaaagctactggtataattgcagattctcaattctataacaactctgctgctaacggtggagctatagatataagtgctactagtggtaatactgcatcagtacttattgatagctgtgtctttggatataatgttgcagatcaaggtggagctatctacattgataatagaactacagtaaacctttatgactctacattatactacaatgaaggtgaagctctcaattaccacatcttcttaaatggagatgcaactcttggctttgaaggtaataacttctatacaacaatacctaccattgtagcagaagacacctacgcttacggtgaaaccataaccattaatggtacattcgattggggagtaaacaacaaacctatcaatatgatttacaccattaacggtgcacctggcactgcagaagtagttgatggcaattacacaatattaattgacaatcaaccagatgtaggtgattacactattgtaattactgcatttactgatgaaaacggaaatgtataccatgtagaaactgctcaaaaaacaattagtgttactaaagcaacccctatcttatctgttgaaggtgatgaatacttaatgcctcctagtgatgatgctactgttaccatttctcttaccgataaagatggaaacggtattaagggcactgttattgtaactgttgctggtgaaacctacttagttgaaactgatgaagatggtgacggcgagctcactattaatgacttacctgctaccacttgggccattgacgctaaattcataggcaacgataactataatgaagttgtaaacgacactgaagagattaccttcatagctgatgttgcatacttcgacataattatcgaagacggtgtttacggcgataagcttactgtcatagttgaaaacgcaactgacattgacggcaatagcttaactggaatggtcacaggcatgatttctacaggcgatgatgacatttcattcatagtatatgtgaataacggtcaaggaaccaacactaccactactgctggcggagttggtaaattcactggagatgcatacttctatgattcaatgatggaatttatgtccggccctgaagaatgcagtgcatatgtaagcccagctaatgctacattatatctagttccatgggatgcagatgatctatcatcagacattgcatatggcgataccatagaattcggcgctgccgtattcggtgtaaatctagaggaattaaacggtactgtatattacatcataaccgaattaaataaaaaaggtgaaattgcgattgtaaacggatctggtgctgtaaacctcactgatattttagatgtaggaacctacactgtcataagctacttcgtagatgacaaaggcaactacgacccagaatcatcagttaactacactaacttcaaagtggccaaagcaacccctaccttaaatgtagagaatgctcaacaagtatatgctgataccaatacaataacattcaatgttacaggcattgatgataaaggtgttaaaggtactgtaattgctattaaacctatttcagaagatgtgtctggtgcaatctacgatcctgaaaccggtcttggagaattaacattcaatggtttagttgtgggcgacaatccaattgtagtaaaattcttaagtgacgatgataactatgcaaatgcagaaaagaccattaacataactatcactcaagctacacttgcaatcgactctacaataaccactcaagaaattgtatatggcaaagatgttgaagctgatgtaaccgtaaccggcatagtccaagaagatactgtaattgcaaatgtcagtttatacgacaacgctactggagaattattagactcctttaacattgcccttggcttggaagacagcatctcattcgaagacttagaagttggcgactactactacacaatcgaatttacaagcgaattatacgctggagacaacttcacatctgaagtattcactgtaaacacagccgaaatccttgatttagattcttccaatgtagacaatgtatcctacggcgaaggaatcgacataaccgtatatgtagatggaatgattgaaggagacctcattgaagttaacttcactgtagttgacgcaacaaccggtgacgatgtattcaatggaacttacaacatcagcaacggtgatgttatcacagttcctccattagatgtaggtaaatacagctatagtgtctcattctatggagatgataaatataacactggcggtgcagattccattgctgctgtcggaagctttgaagtattggatatgtctgatgtagatgttcttgtcactgcagatgaaagcatcacttacggtgaaaaggtcactgtagaaattgatcctatcgtttctgaaggtggattacctgtaacaggtactgctaccatttatgtatatgatgatccagcatctgtagatcctgtatatgttttagctgatgtagaacttgataaagacggcgctactgcagtccttgataccatattgcctactggcgaatactggattgttgtagactttgaaagtgatgatggctactatgatggcagaggcgtaacttcaaccattgttgatttagctctagctaaattatccatagaccctatcactgttacctatggcgaaaccatccctattactgtaacagctcttggcaatggcggtgaactattaaacggaaccgttgaatttaagatttacggtccaggatttgaaggaacagtcactgtcaaaaatggtactggagtaaccaatattacagaaaggtttgatgttggaacctacactatcatagctgcatttggagatgatggtgctaattacgaaggattcaacattacttccttagaaatcactcctgctacccctatagtccgtgtaactggaagtgaagttgaatatggcgaacctagcactgtaactgtcagtgtaagtgacattgatggcatgccattatccggtaaagtaatcgtaactgttgactgggtcgttgacggtcttacccaagtaattgaccttgacgattccaatgaagcttcattcgatctcagcccatatgtccatcaaggaacatacgatgtaactgtaacctacattgcaaacggcaactacggcgaagctgtaaacgacactgaaacagttaatgtaactgcttccactaccgctacagttaacgttgaagttccagaggacgtatcatacggcgatgaactaactatcaaagtcactgctgaagacggcgctggcgaacaaatccctctagaagcagtcaatgtaactgtaaacggtgaaaccaaagaataccctgtagatgaaaacggcactgtaaaccttggcgtattgcctgcaggagataatgaaatcaccgtagctctcgatgacggtactcacaagcctacaaaaactgaagctacagccaaagttgctcctgctgaagctgttgtatttgttgacactgacaatgataacccaagctatggagatgtcgttgttgtaactgtcaatgctaccaacaaggacaaacctatagatgccgatgcatgtcttgttgtagacggctacttaatcggctactacgatcttgaagacggccaagttgaaatctctattaaagacttagcccctggcaaacatgaaatcgaggtttcagtcgcaaacggaaactactctgaaggtagttacggacgcgcaattgtcaatgtagataaagcaactcctgtaatttcagcagaaggcgaaacagtcgaatggggtgaagttgcaactgttaaagttaatgcaaccggtgcaaacggcgaaaaattaaacattcctttagtagtaagagtcatctgggaagtatctggtgtcgatgaacttattgaaattgaaaacggcactggagaagctgctttccaaatctccaactatgttgctcctggaacttacaatgtaactgtcatattcttaggaaatgatgaatattacccagtaaacaacactgaggctaagattatcttaaccgaaccaaaaactgttgaaatggaagtatccatcacccctgacgaatacggcaaagctacaaatgtaactgtaacccttaaggacgttgcaagcaaaccacttgaaggctcaactgtaaccgtaactgtagatggcaaagaatacgctaacgctacaatcggcgaagacggaaccgtaaccgtccctgtagaaggattagaagctggcaaccacactattgctgtcgacttcgatgacggtgaacactcccctgttcatgaggaagaaaacatagcaattgaaccatcaactgatgctaccgttgaagctactgtaaacgtaggcgaaaacgaaaccactgttgatgtaattgttaaggattccacaggtgaaggcataaatggtactgtaattgtctatgtagacggcgaacctgtcgctaacactacagttggcaatgacacttcaagcgtatccattggccaattagctcctggcgaccacacagttgacgttgaatttgtaaaccctaactatgctccaacaagctactccactcatgtaacagaatctacttcactcactaacatgacagttaaagtagacaagaaaaatatcctctatggtgaatcagacataactgcaaccattgaattcacctcagaaggcaaagctcttgacggtgtagttgaagtattgttaaacggtgaagcacaaaacgtaactgtaaccggcggaaaagcaactgtaaaattcagcgacttagctgcagatcactacactgttgtaagtaacttcgctggaaacgctacatacgctccttcaagcgactcagcaaacttcgtagtggaaagaaaagcaaccaagttcaactacaacgacatgaataccacagcagtcaaccctaatgttgatggaagaatcggcgaatacttctacttccaattagttgaccaagacggaaaagcccttgctaacaagagcgtatccatcggattcaacggaaaagtatacaaccgtacaaccaacgaaaccggttgggctaaactccaaatcaacttaagaatcgtattcggatacacctttgcaatctcattcttaggagacgacaactacacaggcgcattcaatgtagccttaatcaacgtaagcgctcaaactcctaagctatccacaagcagcaaggtttacaaagcctctgctaagactaagactttaactgcaaaactcttaacaagctctggaaacgtggacaaaggtaaaaaactaacatttaccgtaaacggtaaatcctactctgcaactaccaacgataaaggtgtggcatctgtaaaagtaagcatctcccagaaaggaacttacagttttaccgtcaagaacgctaaagacaatacatatgcctctgtatctaagactgcgaagttagtaattaaa

SEQ ID NO: 16727 - DNA, 6678 bp, synthetic construct
  source 1..6678: mol_type = other DNA
aattatagatatttatctactcgtttgaataatttgattataaaggctgaggacggcgctgaagtaaatgttgatttaaggggaatgaatcaaaacagtttgtattggactttctatggtgataatgtaactgtaagcggcattaactttatgaatgccaatatgacatcttacaaccttaacaattatcacgctgtattgaaatttatcaactcaagcaattctcgtgtggaagattgttcattcagcaatttgaaatcctatggaattcttgcaggaaacagtactgatgttgtaatcagcaattgtaatttcacaaatggaagctctagaatgttcagtataaccaattcaagtgtcactgttgaagattctatcatgaagaacttctctaccagctacattagaaattccacattcactatggtaaatagcaccgtgacagatttcaatgatgacgacatctttaatttcgcaaacactgatttggatattagggacaatacattcaagaatttgacattcccaaacaaaaccaattttcaacgttttggagtgttctatgcctgggatgataatgctggcataagttataatttcataaacaacacctttgccaatttcactggaacagatgcttatatgatttatcgttcagcatcctcttcagtcaaaccaatgtgcaaagtaaacttcacagacaacaatgtatcaaacgtatctgttggagttaatatatattatggaaatatcactgttgaaaataacagcttcgatcatatgagtccggccaatactttacgtttcagctattcaaacattgacataagagataacaactttacagattctaactctacccatgtttattcagatagatgcaatggtacaattgaatataataatttcattaacaactctgcattgcctgtttcagctgagtggggtaatttgaatatttcctttaacaatttcactgacaataagggcaatttctctgcaggagccattcaatctactggagtagtgaatatatttaacaatactttctgtaacaattccgctcgcgttggtgctgtgaatgttgccagcattagtagtaataaaaccatttacaataacacatttgtcaacaacacaggtgttagcggtaccctttatgtcaatggaaatgcaacagttcatgacaacagattcatagacaataatgtaagcgaaaatggaggagccatctatgcagcatatgataatagctataataattattataatatttctgctaatattactgacaatattttcgatggaaatattgctaataagggtggtgcaatctattatgaacaatataatagcgcttatggccttgataacttggcaaacaacacatttgtcaataacaaagccgaatatggtggtgcaatttattcaaataaaacagtgaatgtcactatttcagagaacgagtttgtcaataacagtgcaacaattggaggtgctatctttttagacaattatacctctgcctttaacactggaacaaacattactctaaacaatttcacaaacaactctgcacaaagtgctggagctgtagtggtttatggaaacaacaccaatgttataggcaataactttgttggaaacaatgctacacgctatggtggtggtgcacttgtgactgatggtgcaaatggattgatttataacaacacatttgaaaacaacaccgcattcctatatgcaggagccatcggaacaaacaacagcaagatcataaacaacactttcactaacaacaacgcttatcaggctggagcaattttaacaatcaattccactatacataataacacattcagtggaaatgacgctacaagagctcctagtgttggctatatagacaattacaactacactgtttcctcttactacgtttactactgtagcagtgaagattgcagcggatgcactgcatgcgaatcctgcacaagcacaatcatcgaccctataaccggagcggaaatcaaggtaatcaactgctctaacggtgatgtacctgagtgcatttgtgaagattcagttgcaacattgtataatattagcctattgtacaataatgaaggtctcaatcttgatgaagatgtttatgtttacgatgaaagcaccattcttagagttgctttaaacaataatgatatgtacttcctatatgaaaacgcaagcattccaaatgccagcgaatatcattactgggcatactgcattgaacagaacaactctaagccatggcaatggaacggaactactggtgttcttgtagatgacttgtactttgtaagaaacagcctggacggctcttatgttggagattacattaaggtattggtatcctacttctactttaaccttgacgaggatgtctataacttgaaagattatgtatatgtatttacagacactgactatcgtgctaatacagatagggtaattcgaagagttattaaccttacagaaagagaggacacatctcttgtaaacggcaataactggattaacggagtttataactgtctttcattccatagctttatcatgcctaccacaagacagaacctgattctcattaattcatgtatggctatgcagactccagacttcaatcctcagaaaatagccaacaaggagaatgtcggcactggagacattgtaaactacacagtcactgtttacaacaatggtactgtgtcactgcataatgtgactgtaaccgaaaggcctaacagcatgcttacctatctatcattcactgatttccgcaatcaaggatgggtgcaaactggtgagatgacttgggtcttgaataggcctctgaaggtccatgaaactggtacattcaatataaactttagggtaaataatgtcacatatctcactaatatcacaaactatattgatgtaggctgtgatgaggtttcaaacaaatctgcttttaccagaaccgaaaccaaatggccacgcatacaggttcaaaaaatcactttggaccaaaatgtaactccaggatcaactgtaagattcttgcttttagttaaaaatataggaacccttgaagcaagcaacatcactttggtggacaattttaatagaaatgaattggagtacgaatatagatgggattcatataaaggtaattggtctggaggacacggatggggaggaagcagctcttcttggcatgtcgacacattatacttgaaccaagtcctctatccgggtcaagaggctggagtgattatctacttcaaagtacctaacaatgtaacagtagggtctgcttataattcagtaaatgcttatagaaacggaacatctgaaggttattcaagcaattacacaattatacaacgtccttacttttcaatttggaaaaccttggttagctcaaaaacttcaaccataggagaggaagtggtattccaaatcaacgtacagaatacaggttatgtgaatttaactggtgtttatgtagaagacattcttccaataggattgaaatatcttaggttctacaatacagataatcataactggactcattttgtagatgaagatggaaaacatagattcctattgcaaaacactcttcctacctattattcagacagtcagaattatgttgcccgactttatattgtctgcaatgctacagaatatggtaattggtacaaccttgctacaggatacacagaacagacaaataagagtacctctcaggcaaatgttacaataattccatttggtgtatcaattgagaaagtcagcaataatccaatatcacaagttggagatcaggtctcatttaccattagggtaagaaacacaggaatatataacttaactgatgtctatgtaaatgaaacaaggaactcctatatggtattcgatcactttgttgacaattcaggcaagtggattttaaatgaatcttatgcaacttcaggcgtgcctagctggaattataatggtacttttgaagtaggagctgtaagcgaatttgatgttttctataatgttactaatattaattattatggaaacataacaaataccgcttatgtctcttccaaccaaactaccaacaggtctgtttccaatcagacagctgcctataatattaaggtaagaaaaatcagcaataatgctacagcaagggttggagatcaagtttcgttcactatccaaatatcacgggatggctattcttgggaaagtcctttctcattatatggcattcatgtaaaagatttggttcctgatggcttggtatttgaccatgctgataacagttactattggatttataatgaaagcgatgagacatggtactatagatctggtttgacagcaggcagaaccattagccttacattgtactttaatgtgaccaaggcagccaacataaccaatgttgcaattgtcggagtcaataacagtacagtgaaaactgcaaataatactacaaacagtatttaccataacttgcaagtggaaaaggtcactttaaacgaaacagtttacccaggaaatatcacagaattccttgttcgtgtgaacaacaccggtgacaataacctcacaaatgtattcgttaaagaaaacattccaaacggacttgtttactatgattatattaataagactggcaaatggaattatacggaagatgatgacggacctatatggctttatgatggcattttagctccaggagcattcggtgaattcattataagattcaatacaaccgtacctggaatctttgtcaacaatgtcgtagcaggctctaatgaaacttccaataagtccactgagaattcaaccaaagtcttgggtccaataatctctgttggaaaaatcactttaaacaagaccgtatatattggagagctaactgaatttagaattaaagtctctaatgatggggactgtaatttatctggcgtatatgttgttgaatacatcccagatggcttaaagttcgttgaatttaaagatgaaagtggtttatggacttacaatgaatcaagcagaacattctattacaatggaattttagaacgtgatgattcccttgagtttgtcgttgtatttaatgcaacaagagcaggcaactttaccaatgttgttcatgcaggatctaacgtgactaacgaatcagttgcaaacaacactactgaagcattggatgtaagaatggacattcaaaaggtcaccttaaacgaaaccgtattcactggtcaggaaaccggatttgtaattgtcgtttccaataccggacttaaggacttgactgatgtccgccttaaggaaatttatccagatggcttagtatattcacgcttcatagatgattcaggcaaatggtttaacagaggtgattattggatctataatggtgttttagctgttggagaaagcactaacttcactgttatattcaacacaaccaagagcggcacattcaacaatacaataattgtaagctctaatgaaacaggtcctaagaacacttcaaataccactaaggtagttgtagcaaatgttaccgttgcgaagatcacattaaatgaaactgtcatgagcggagagcaaaccagcttcgacattgttgtcaccaacgacggaatctataacttgactggtgttgtcgttaccgacgccttccctgaaggcttggcttacagcggcttcgttgatgcttccggcaagtggatctttgatgattccaaaggaaatgcttggatttataatggcactttggctcctggtgagtctgcaagctttacagttgtctttgacactgatgaagtaggtgaattcactaacatagtcaaggtaagcactaaccaaacccaagataagaacgcgtccaatataaccaaggtaatcaagcttattccaaatgtcgcaatccaaaaggtcactcttaacagaacagtctacagcggagagcaaaccagcttcgaaattattgtaagaaataatggagaaatgaatttaactgctgtgacagttactgacgccttccctgaaggcttggcttacagcggcttcgttgatgcttctggcaagtggatatttgatgatgctaagggcaatgcttggatttatgatggcattttggctcctggtgagtctgcaagctttacagttgtctttgacaccaatcaaacaggcaactttacaaacattgtaacagtaagcagcaatcaaactaaagagaaaaatgcatccaatattactgaagtaatcattaaatctgttccaggcattgagattataaaaatcacaatcaacagaactgtatacagcggtgagcaaacttcatttgacattgttgtaagcaatgatggtaatgtcaatttaagcaatgtgactgtaatcgacagcttccctgaaggcttgacctacagcaatttcattgacgacactggaaaatggtttaacataggcaataagtggatttataatggaattctacttcctggtgagtctgctggtttcagaattgtctttgataccaataagtctggaaacttcactaaccatgtaaaagtcacaagcaatgagactggagagaaaaactcatccaatgttaccgaagtaatatttgct

SEQ ID NO: 16728 - DNA, 6927 bp, synthetic construct
  source 1..6927: mol_type = other DNA
atcttcattggtgaaggtacttatgttgaatccaacctcacaatcagcaaagacttaaacatcactgcacttggagaagtgatttgggatgctaacggtcaaagggcattctccatgtctacaggtagtgtatccatttcaaacattacattcataaacggtaactacacccgcaatggtcacttgatctactgtgctggtgacagtctcaaattcgatgaatgtaagttcttaagcaacggtggaaatgtaactggtaccaacggagtcatctatgtagaacttgcaagtgcaaacttcaacaactgttacttcgaaaacaacactgcaggtactggaacaagctatggtttgatttccgctaaagattcagttattatagtagatggctgtacatttgtaaacaactttaataaaaacggctgtatttatgtaagcggatctaatattgggtccatggctgtcataaataataccaaattcattggaaacaatgctacctctgcaagcggaggttctggtggagctatctatgcaagcggttcaatggcttaccaatactctaacggtactgtaagacctggtgctcaatctgctgtctatgtaattgactgtgactttatcaataacactgctttcggcggtaaatactacaacgctgaaggtggagctatctttgtaaatgcaaatgcaacattatatgcatctaattcaagattcatcgataatactgctcttgattatgaagaaactaataaatcaggtcgtggaggagctattgcggccacaacaggtaatgtacaaatttcaaattgtatattccaaggcaacactgctaacaatggttctgttatcgccatgaaatttgcaaacaaagaccttacaactgtaaatgtcttaagcataagcaactctgtaatcatgggccctggcgaaaaattaattgtctctgacttcactaacggttctttagttgccaacaacaactggtgggcagcgaatgaaaacccatctgatagggtaagcgaaggaatcactgtagacagttgggtaatcctaactgcagatccaagtgaaatcactggaactcttgatgaaattataccaatcgttgctaacttcagacacaccaacagcactgatggaactatcggtgatttggaaggagaattcccagaactagaagtattcggaatgactttagatgaaggtgaaattactgaatccaaccttactgtagacaatgtagctaccctttactacactccagaagaaactggtgaaaccactgtatatgctatttcaggcaatgcaatggttccaatcaaagtaactataaccgacactcctcaacctgttgcagatgttatctatgtatcaccatccggtgctgataccaatgcaggtacatatgaagctcctgttgcaaccattgcacacgcagtggaacttgcaggtgctgaaggtgcttcaggtttagtcgtcattgaagaaggtatctataacgaaaacggcattgtaataaactctgctatacctattaccattacaggtaacggaactgttataatcagaggaaacaaccatgtcgttaacggaaacggagctggaagatttggcgatgtaagcgaatccacaagcataataattgtaaacacaactgaagctgttgttattgcaaacattgcatttgaagacaacattgcagcaaacggtggtgcaatactcattgcaggaaccagcagttccaacttattcgatgctgatgtattggttgaaaactgtagtttcaataacttgcaaggaagaaatggtggtgctatctatgcatactacgctattggcaacctaactgtagccaattgtgaattcacaaacatcaacgcaacttgggctgctttatgcgcatatcaagctgcttatggcgaagggctcactgtagagataaaagattcaagctttacaaacaactctgcaaacaatgctcctgcactttacttgcaagcaactaatgttgtaataaaagattccaactttacagacaacaatgcaacctaccaccctggtgctatctacttgcagaacactactgcaacaatcgacaattgtattgttgcaaacaactctgctaaatacgataaggcagctattgcaatccatggaggcaatatccaatacaacccagtaattgtaaaaccttctgaagtaacaattacaaactctattattgaaaacaacatcggtagggataaagcagctcctgctatctacttggaaaactccatcttaaacatgtcttactcttctgtagtaaacgaaatcaacattaacaataccgttactgcaacctatggagatgaaaaacctggacttgttttaatcaacaacaactggtggggaaccaacgacccaagcactaccatattcggtacaaacatcactatggacaattgggtcatcatgaatgtagaagcaaacgctactgaaatccttgctggagaagaagtaaaattaactgttgactttaaccatgtaaacactaccgctggtgagattgaagaattaaccggtggagttattccaagagaatcctacagtgtagcactttctgtagataatggtactgttgcacctgaaacattaaccattgctaacggagctactggcgaagcaattttcactgcagctaatgctaatgcattaataactgtaacaagcgaaaatgcagttgaaactatattgattaatgttggagaacaaccagttccattcactggagttgtatatgtctccaaagatggtgatgacgctaatgaaggttctgaagatgagcctgtagcaagccttgcaagagctattgaaatcgctacagctgaagaaggatctggtcaaatcatcattaaggaaggcacatacattgttgacggatacaacattaccaaagacttaaccattactggtgaaggagatgtaatactcgatgctcaaaaccaaggcaacagattattcaatatggcctatggtactactgtatccaatttcgaattgcataaccttgttcttgctaatgtaactgctatgtatggcgcagttgtttacagctatgcagctaatgcagtcttagacaacattacagttgctggaatcaaccatgaaatggctaggctcatttcaaactatggtaatttaacaattaaagactctgtatttgcaaacaacactgtaagcggaataatcacccactctggaaacaataatttaaatattgtcaatacaatatttgaaggcaacaatgtaacatatgattcatctatcatgggtgtggtttatgtttcatcaggcagaggaaacataacaatcgaagattccaaattctatgacaaccttgtacgtcaatccacagtacgcggttacacagatactaacattacagtcaaaggtactgaattcattaacaacactgcagacaactctccatattactgctctggcggagctatttttgcacaagctaatttggatgtaacagaatccatattcatcaataacaatgctagaagagaaggaggagcaatttatattggaatcaatggtgtggcaaacatcaccaaatccgagttcatcaataacacaatctatgataatgagtactatggagatgcaatctacactaaaggtacaactgccatcaattactgtatattcttgacaaatggcacaagatatgcagtttacaatggcggatccaaagaagtaaatgctcaatacaactggtggggcactaacgacgatcctcaaggatttgcttactctgcagatgcatctaactggattattatgactgtaaccgctccaagcactcaagatattcaagcaggagacgaatatgaattgactgttgacttcaaccattacactgatggcagtgacattttagaattgccagatagcttagctcaagaattgactgtagaattcacttctaccacaggcacatttgacaatcctgtagtaactactgaaaatcaagtggctactgcaaaatacactgtagttgcaggtgaaaacagtatcacagtaaaatccactgatgctgtatggaacactagtttcactgctggagaaaaggctaaggctaagatgaatgtttcaatggaaaacaatacaattattgtaacccttaccgatgaggaaggagctcctattgcaggcaaaaccattagtgtgctcattaacgaagacacattatccaacgaaaccaattcaagcggtattgctgcaatttcacttggcactttagatgctggcacttatccagctacaatcagcttagctgacagcgaatatcaagctccagagctaactgtatttgtacttgtagaagagactcttgtagacaaccctataggtgcagtcattgaattggctcttgctgaaaatggcacttccattgaagtgaccttgaaggacattaacggtcagcctattggcgatactattgttagatattacattggaagcactgatggagctctccttcctattgatgcaaacggtaaaggatcatttgacattgacaatacagtcaatcaaaccattaaggtcagctacactaaggaaggcactgaatggtcttcatattatgactttattgtaaacaatgaagtaactcctgttcctgttgccaataacgctaaattcgatgtaattgttcgtgaagatagcattgatgtattcttatacaacgataacttagacgatttcgaaggcgctaagattatggttactatcggtgaagaagatccagttgaatatattgctggagagaacggaaatataaccatccctatcaatggcgataccactgtagagctttcatacactgatgaaaacggagctactgtctaccacactgttaaagtttccactagtggtgtggatccttctgctgaaattgaaattatcgtcgaatctcataacgacacttctattgaagtaagcgtaactgttgatggtgatgatgtcagtgatggtgaaattacctattacattggtgatgatgacgatggaacagttgttcctattgaagatggaattgctatcataccattcgacaatactgtaaatcaaaccatcgaaatcacatactcagatggtgacgctacagagtcagtatactacactatagttgcattcactcacgaagttcctgttgagcctcctgtagctaatggcagctttgatgttgaaacaactgatgatgctattgttgctactttagttgactctgatggtaaacctattgctgatgcaactgtttctgctatagtcaatggcgaagagcaaaacttcacaactgatgcggatggtaagctaagcgttcctattgatggcaatgcaactgttgagcttagctacacagatcctgaaaacggtgctgtcttaaaatatgtaactgatgtggtaactaaagaagttcctattgaagttcctgttgttgctaacggcactatgagtgtagaaacaactgatgatgctgttgaagctaccttagttgacagtgacggaaaccctattgaaaatgctactgtcactgctgtaatcgatggtgaggaacaaaacttcacaactgatgcagatggtaaggtaagcattcctgtaggtgaaaacgctactgtagagctttcatacactgaccctgaaaacggtgcagttgttaaatacagcactaaagtcgtaactaaagaagtggaagttcctgttgacgttcctgttgttgctaacggaacattaactgttgaaacaactgacgatgctattgtcgctacattagttgacagcgacggcaaaccaattgctaacgctactatcattgcagttgtagatggcgaggaaatggaaatacctaccgacgaagatggtaaatgcagcgttcttatcacaggaaacaacactgtagagttcagctacacagatcctgcaaacaacgctacagtttcatactccactaaagtggtcactgaagtcgaagaagtaatcgttcctgttccagtagttgctaacgctacaatctccttaagcactgaagacggcagctcaatcgttgcaaccctaaaggaccttgacggcaacgcaatagcaaacgctacacttgatgctaatgtcaatggcgaagaaactaagttaactacagatgcaaacggaatagcaactattcctgtatctgcaaacacaacagcagtagtctcctacacagattctaacaaagctactgtaacaagctcaatgagcctaacagtaatcgaaaccatcgtagaaatcaacaagacaattgaagttcctccagtaagaaacgcatctcaaatcgtttgtgaagacatgaacacaattgcagttgcaaaagatgatggaagaatcggagaatacttctacgtaaaactagttgacgcaaacggcaatgcattagtcaacaagtccgtacaaatcggattcaacggcagagtatacaaccgtacaactaatgaaacaggtgatgtaaaactacaaatcaacctcgcatacaaaggaacctacacattcgctatcgcatacctaggcgatgacaactacaacggttcatttgtcgtttcaaagattacagtaaaacaacaaagtcctaagattactacaacttccaagacttataaggctagcgcaaaaacaaaagcattgaccgctacctttaagacagcaaatggaaacctaatagctgataagactattaagtttactgtaaacggtaagacatactctggcaagaccaatgcaaaaggtgtagcaactgtaaaagtaagccttaacactaaaggaacttacagctttacagcaaaatacgcaggagacgacacctttaaggcaactagtgcaagcggtaaattaactattaaa

SEQ ID NO: 16729 - DNA, 204 bp, synthetic construct
  source 1..204: mol_type = other DNA
tccggagaccccgacggacttgaaaagagcgcagaggatgccaacgtgggggaggatgtggaagcaccagtcatggaagctcccttcccggactacacctacgagcctctcgagaagatcggtgaaatcggcgtattgattctgggcgccctgataacactaattgttgcgtgggggatcggctatgccctgaaaagaagcgag

SEQ ID NO: 16730 - DNA, 531 bp, synthetic construct
  source 1..531: mol_type = other DNA
tttaataacactgtaaacatctatctcgacggggagaacgtcagtgtggaaacacagactttcgaggatatcgactcgaacagtctgaacaaggacatctgctcctacaccctgaatgtgatgaacaatacaacctccgatgtggagactttaaagaatggagtggaaaagctgtgttatcagcatggtcttgaggatgctgaaatcaacatcgattcaagcctcggacacgaccagatccccatcattgtccatgttgacggcacctcaatgctgccaacattgcaaaacgggcagacggtcctcgtaaataaaacacacgacttcgaggttggcgacattgtggtggcagaatccaaggaatacggtggaatcattaagagggtggagaaaattgacgagaataaggttcacctgataagcgacaacaaaaatatcagctacgagtacattgacggcgccctatatcaaatcaaagggataaccacctgggtcgatatatctgatgtcaacggcgtggtgattgattac

SEQ ID NO: 16731 - DNA, 654 bp, synthetic construct
  source 1..654: mol_type = other DNA
gcggaccccctgaccgataaccagctgaacccaactattttttaccttgacttcaaccacggcgctctgaatgatggttttaaaaaagaatttgatctcttcgagtatgttcccacatttgatagcgtagacctatacaacgacggagaaaacgtctctgtaagcttctacagtctgaaccctaccattgacgtggacaacttaaatgacgagatcatagactatacattcgaggtgatggaagaccctaaagccaatatcacgacactcaaggacgggataagaaacatctgcagcgagtatggggccgatgacgtcaagattaatgtggattctgtcattggagaggacgaaattccagtaatcttcacaactgagggagattccatgctcccgaccataaaatcaggagataaggtcttggtgaataagagtcataatatccacgtgggcaacctggtgtccgcaaactcgtcagagtacggccccatctgtaaaagggtggcagatatcgatggggactccgtttaccttgtcagcgacaataagaaggttactcgggagtactacgatgactattacgtggaatataagggcatcaccacctgggtgaacattgatgatattgacggtgtgatcatcgacatcatgaat

SEQ ID NO: 16732 - DNA, 723 bp, synthetic construct
  source 1..723: mol_type = other DNA
tcagtcggtacctcaaacggagacctaaatggccaggatgttcaactcgccgccgcagcttccttgaagaatgtgtatgacgagaagctgatccctatgtttgaagagaagtaccctggagtgaaggtgaccccgacttacgccagctccggggacctgcaaaaacagattgaaaatgggctgaaagccgatgtgttcatgagcgccggcaacaaacagatggacgccctcatcaatgaaagttacgtggacaacgattccaatgttaagttcctggagaacaagcttgtgctgatcgtgtctgctgacagcaacgtgaatatcagcagcttcgaagatctaaagaacgtcaacgggacgatcgccataggtgaccccgaatccgtgccagccggccagtatgctaatgagtcattacataacctgggcatatgggatgatgtggagtcgaaactctctttgggcaccgacgtcacagcagtcctgaaccaggtagctcaaggaagcgccgactgcgggcttgtctacacaactgatgctaagtctagtgatgaggttaaagtcatttgtgaggcgcccgaagacagcctcaaagatattgtgtatccagtagcgccaatcaaggattccgaacacgcagacgctgcaaacaagtttatggagttcctgcagacccccgaggcacagagtgtatttgaggactacggattcacaattcacgag

SEQ ID NO: 16733 - DNA, 756 bp, synthetic construct
  source 1..756: mol_type = other DNA
tgctcggcaggtttcctggactttctgggaggagacaacgctacagacgacagtctgaatggcaaagaggttaatttagccgccgccgccagtctaaaaaatgtctatgatgatgagttgattccaatgtttgaggcaaagtatcctggcgtcaaggtgactcccacttacgcctcaagcggcgacctccaaacacagattgagaacggtctggagacagacgttttcatgagcgcctccaacaagcagatgaacgctctcgctgatgaggggctaatcgacaatgacaccaacctgcagttcctcgagaataaagtggtgctgatcgtaccgaaggattccgaccttaacatcacaagcttcgatgaccttaaagatgtgaaggggaccattgcgatcggggacccagaatctgtccctgcaggacagtacgctaaggaggcactgaccaacctcgggatctgggacgctgtggagtccaagttcagcctgggaacggatgtcactgctgtcttgaatcaggtagcccagggtagcgctgagtgtggcatagtatatgcgacagacgccaagtccaatgatgatgtgaaggtggtgtgcgaagctcccgaaaactctctgaacacgtcagtgatataccccgttgcaatgatcaaagacgcgaaggatgcagatgccgcaaaagccttcctcgaatttcttcagacccaagaagccaaggacaaatttgtggaatacggctttaccattcacgaa

SEQ ID NO: 16734 - DNA, 783 bp, synthetic construct
  source 1..783: mol_type = other DNA
aacgacctctccgattccaatgtttcaagtgacctgactgttgacagcgactcgataagctctgatgatacaggttctagcgacacaagtagtgatgattcaaaccaggatgatgtctctcaggacaagacgaacgataagaaactgtcggactcccagtcagactcatccaaggacactcaagacaccgacgacaacaataccgacaacggtagcgataaatgcaatctgattatcaccaaaaagggcaatgagaaagtcaaagtgggggatacggtggaatggacaatcgaggtaaagaactccctaaacactgccgaaaacatcagtgtcgatgagttcctcccccagaactttgagttcaagagtgctaaggccagcaaaggaaactacgccgttgagatcgcaaactgggacattgggaatttaaaggaaaatgaatctgctaccctcgtgattaaggctcaagcactgaaggcgggaaacttcaccaatgtggcaaacctcactaccgattccgataacatcaatggcaaggtcctgagcgccaaggccgacgtggaagtgctttccgagaataaaaagaatgagacacctgtaggaccgaagaagaacaaagacaataactctacagtcaaaaagattcacaaactgattaagaatcagacaaacaacaccaatatgactccaatcgactttaagaaaagcggcaatagcttgttcgccgtgatcatagcggctttggcagtgcttgggatctttctgggcaggcggagaataaac

SEQ ID NO: 16735 - DNA, 1026 bp, synthetic construct
  source 1..1026: mol_type = other DNA
tcacccagctctatctctacagatgggaataccacaataaccgacatggccaatcgcactgtcaacatttcaagttccgttgatcgagtggtcgcaacaagtccacccatgaccacgatcgtctatatgctggcccctgaaaaactggttggggtaaacttccaatggactgatgaggaactcaaatacgtgccggaccagtataaggataaattcccagttatcggcggctggtttggaagtcaggacgggaattatgaagagttcattgcctctgagcctaacctggtgattgaaggaattgacgaaggaatgggtgtcgacctctcaaccgtggaagaacggcaggagaagttcggttcacttcctgtagtggctgtcacagacaatacaaacgtgacaaagatagacaacacgatagagttccttggcaagctgctgggggccgaggacaaggcaaatgagttaattgcctttaacgataagtacctatcccaggtacaatccaccgccagcagcattccggatagtgagaagaaatcggtgtattacgcttccggcgaggatggactgtccacttacgcaagtggcgcttcacacggtcaattgatctctctggtgggaggcaaaaacgtcgcagacaccgaggttaaggacagcggaagcgagctcactgtgtccattgaacaggtaatgtcttggaatcctgatgttatcatcgccacagatgaggacttttacaacaaggtgtataacgactccaaatgggctagcgtcaaggcagtgaaggaccatagagtctacctgtcgccacagtctccatttaagtggttcgataggccccccggggcgaacataatcatcggcgtgccctggactgctaaggtgatctacccagataaatattccaacatcgatatggtgggagccaccaaagagttttatagcaatttctaccactacggccttagtgacgaacaggcgaaagagatcctcaccagcagcggtctaaaggggtctgacttg

SEQ ID NO: 16736 - DNA, 1029 bp, synthetic construct
  source 1..1029: mol_type = other DNA
ctcactcctagcagtgtggaaacagaaggctctaaaaacataaccgacatgttaaacagaaccgtcgaagtgccaaatggggtgaataacgttatagctacaagcccgcccatgactacagtactgtacatgctgagccctgagaagctaaaggcagtgaacttccagtggactgaggacgaactcaaatacgtgccatccgaatatgccaatctgccagtggtgggcggatggtatggaacacaagacgggagctacgaggaatttatcgcggctgagcccgatatcgtgattgagagcatcgacgaggggggggacggcgatgcattcaccgtgcaggagaggcaggataaatttggcaagattcccgtgctggccgtgaaggacaccacaaatgtcgagaagataggagattccatctccttcatgggtgaggtcatcggtacggaagacaaggctaaccaactgaatgagtttaacaccaaatatttggatattgtacacgacaagtcatcgaagctggtggacagcaacaaaaaaacagtatactatgccgcgtccagtgacggtctgcaaacgtacccgtccggagcctctcacggccagctcattgacttgatcgggggcaaaaacgtcgccgatagcctaaaccagggaaatactaccagcggcgtccaggtctccatcgaacaggtcattaagctcgatccagatgttataatcactaatgatatgcatttctataacaaagtgtataacgactcaagttgggcacatcttaaagccgtgaagaataagaaggtttatgtcagcccacagtctcccttcaagtggtttgacaagcctgttggcgctaacatgattatcggtgttccctggaccgccaaggtcatctaccctgaggactacaaggacattaatatggtggatgtaaccaaagagttctacagtaacttctaccactttgatctgaatgacaaccaggcaaaagagatcctccttgattcaggactgaaggaatcaaatctt

SEQ ID NO: 16737 - DNA, 1056 bp, synthetic construct
  source 1..1056: mol_type = other DNA
agtgaaaacatagtaattgatgagtcgtccgattccaatctggtgatagaccacgccaaggacaattacttattcaatgggcccataaaggacaattaccttagcagcagttctattagtgataactacctcagcaaaggggttctcgatgactcgtatctgtcaaggagcgacctggatgatagctatctgtccatggacgatggcaaaggctctatcgatttgacgaaccacaaccaactaagcaactcagacgataagcagctgaaaacttctaatttagaggatgagaaacagcttgaaagtgtgaataaaggggataagcttctgaaagatagtaacgacaacgtcgatctgtttattaatatggacgtaaagacatcactgaccaacaagcagtataaccgggcaggaagcgaagtcccttggattatcaccgtctccagcctcaacggcaccagctacaacacccaggttcgcgacgtgctctccgaaaatctacagtacctgtcccacaatgctacaatgggaacattcgatccagagaacggaatctggactgtgggtgacctggaatcttctaaaaacgccagcctgacaatcctcacacggctgaagcgcgacgggacatacatcaacaaggcctacgcgactaccgactctaacgatgtcaacctcttgaataacttcctaatcatctccataaggaccggttcatcaaagatcactagcaacattacggagaccagtgacgagcgagagggaattcagcataatgtgcattatgctagtatggtggacacggactttatctatagatacgaagaggactcctcagaggacgacggcggcaacgaagaaggccaatctgaggggaattcccacaccaagactagatctttgggcaataagttgaagctgttcaatgctcagaacatcgattatcattctctttccaaaaacatcggtggcgcactcggttttggatacaactcaaatgggggattccttaatagcaaggacatttacgaggccctgtttgtgtatgactacaca

SEQ ID NO: 16738 - DNA, 1539 bp, synthetic construct
  source 1..1539: mol_type = other DNA
ggaggaggcactactgagcgggggcccggcgagatcgtagtggccgcctacagtcatggcggagagccagaggctgggttcgatccaattgccggctggaattattatgccgagccactcattcaatcaaccctgttgaaaatgacccccaacggcacgtacgccaaagatttggccacagactacgagattagcgatgattataagacatacactgtcgacctgcgcaaagatgtcaaattcactgacggttctgacttgacagctgaggatgttgcatttacatacaacgccgcgaaggaaagcggcgcaagcctggacctcagcgccctggataaggccgaggcccaaggcgattacaaggtcaaatttaccctgaataaatcagattccactttcctggataagatggcatacatcggtattgtgccgtccgattcttataacaacgaatcatatggcgagaacccaatcgggtcgggaccctacaaattcgtgcagtgggacaagggtcaacaggtgatcctggagaagaatcccgattactatggtaaacagcctgagatcgaaaagataaccattctctttgcccagaacgaggctgcgttcaaccttgctaagaatggagaagccgatatcgtggccgtccctctcgagtatgggaaagagaagcttgacgggtacacaatgtacctacaagacaccatcgacgtgcgtggggtttctctgcctagtgtgccggataccggagagctgtctcccgatgacaactacacaatcgggaataatgtcacctgcgatattgcaatccgcaaggcattgaactatgggattaacaggacggctctagccgagggcgcactaaatggcttaggttatccaagctatgacggtattgctcaccagcttccatgggctaataaggaggccgcaatagaagacggcgacgtggcctacgcaaacaagaccctggaggaagctggatgggttgactctgacggagatggaatcagggagaagaacggcaccaaggcttcatttaagatctactactcggccagtgcccctgagagacaggcgctggctgtcggggctgccgaacaggcgaagcagttcggtatagaaatcgaacctgtaggggctgaatgggacgaaatctatcctaatgagttttcacagggagtgctctggggatacggcagcacagatccatctgacatgtatggcgagtactacagttcctctgacttcaaccccgcacgagtaaataacagtgctgtggacaaacacatggatgacgcatttgctgaatcccgggaagactcctacaaagattggtccgcagttagctgggacggtagcaccggtattagccctaagggcgacgcaaattggctgtggttaggggaaatcaagtatggctacttcgtgaacgacagagtggacatatccaatgacacggcgctcctgcagccccacggaggagaccttttctccaacgtctatgattggacaatgactaacgctactgccgaaaaa

SEQ ID NO: 16739 - DNA, 1542 bp, synthetic construct
  source 1..1542: mol_type = other DNA
ggcagctcaactgagcgagcagacaatgagctgatagtggcggcttacagtcatggtggagaacccgaagctgggtttgatccaatcctgggatggaactactactccgagcccctcatccagtccaccctcctcaagatgacaagaggaatgaagtatgagaacgatctagctaagagctgggaagctaatagtgattttacagaatatacagttaagatcagggacgatgtgaaattcacagacaacaccaccctagacgccgaggacgtggctttcacatacaacgaagccaagaaaagtggagccagccttgacctgagtagtatggagaatgcaactgccgtagacaaacagactatcaagtttgaactgaaccggcccgattccaccttcgtcgacaaatttgcatacatcgggattgtgccttctgattcgtacaacaatgagacctatggtgccaaccccatcggatccgggccctttaaattcgtccagtgggacaaaggccagcaagtaatcctggagaaaaacccagactactatggaaaagagatcaagtttgacaagctgacaattctcttcgaacagaacgaggccgctttcaatgccgccaaaaataaggaggttgacatagccgccgttcccttgtcttatgcaaatgagaccgtagacggctacaatatgcacctcatggacaccatcgatgttcgcggcctgtcccttccagtccagaacaataccgggaagttgagcgaggatgggaatccaataggcaacaacattactgcagacaaatccatcagagaggctcttaactatggcgtgaataggaccgcaatatgcaaaggagctttaaacggcatcggagtgccaaactacgatgggatcgctcacttactgccatgggccaataatgaatctgctattgacgacggagatgtggataaagctaaggacatcttggagaaaggcgggtggaaggacaccgatggcgatggcatcgtggagaaggacgggaagaaggccagcataaacgtgtactactcatcaaatgcacctgaacggcaagcgattgccgtgacgattgctgaggaggccaaggaatttggtattgaggttaacgcaactggttcaaactgggatgaaatggacaagattaagaatacagacccggtcgtatggggcttcggtagcactgacccgtcaacaatgtggtctgaatactacagcgatcaggcaacggtcgggtataataaccctgcactgatcaacaatagtgcggtcgacaagcatattgataacgcgatgaaatctgatcgcgagtcctcgtatgccgagtggtctgctgtgtcctgggatgggcaaacgggtatttcacctaagggtgacgccgcctggctgtgggtgggcgaaattaagtacggctatttcgtggatgaaagcctcgacataagcaacaacactgagctgatccagcctcacggaggagatattttcggcaacatctatgattggagccgtgtctcttccatcgaaaag

SEQ ID NO: 16740 - DNA, 1545 bp, synthetic construct
  source 1..1545: mol_type = other DNA
gcggacattatcgccgacaatcaggatagcatcagctccaatgacaattcaatcaatgaaattgctacggaagacattagtaaagacattaatgacaagtctcttagcgatggagtcagcaccggcggaaacaattggattgtaaagccatcgacagatgggaaaagcgatgccaattccattcaaaaggcaatcaacctcgataacacaaagcctggagacagtctccttttgactgataagaacttcaccctcgagaagtcagtgtccttgaataaagacctgacaatcaatgggggcaatatctacaaccagaacaatcttacggatctattcataatcgatcccaagtctgaaggcggtcccaagaacatcacaatcaccaatgttacattttatgtaaacgggaacgagaacattgtgctcgcgaatggagagaactacggcacaacttatatcgaccttgccaacataaaaataagtaactgtacaatcctgcctatcaacccagacagcaatatcaacgataccgtgctgctgaatataaaatccgatagaacagtcggccagacaggtcagagtacaggattcgtcttggtttcgggcaacaagctaaacggcataaacaccctgaagaataacgattacgtgctgaaggacgactttgttattcaaaaggcggaccccatcctgaacaccgccctaatctgccctaacatgactattaccacctatgataaaaacacgaatgacacccccagctattatgaggtgaaattgatcgaccagaatgtcaatcctgtgatcaacaggacaattcagattggattcaatggcaaaatctatgatcggacaagcgatgaaaacgggatagccaaggtcaagctgaccttagcttacacctcagtttacacctttgcagtttacttcctcggtgatgagtcctatgcaagtgcatttgacgtgtcaactgtgacaatcattaagaaaaatgccacaatcacgccaaagaccgtgagctataacgtaaatgcaaaaacaaaaactctgactgctaccctgaaagacaaaaacaacaaggctctggccaataagaaggtcactttcactgtaaatgggaaaacctacactgccaccacaaactctaagggtgtggcaagcgctaagatcagcctcagtaagaaaggcacatacactttcactgcccaggtgttgcaggggaccatttctataattcagtttccaaagaagggtaagctgaccttaaacccgctgtcaacaaaccttactgtcaagaagtacaccttcaagaaggccgccactaagaagatccaagtcactctcaaatccggcaagactgtgctgaagtccaaaaagctcaccatcaaagtgaacggaaaaacctactccgggaagacgaacaccaagggcatcgctacaattaccatcaaactgacgaaaaaagggacctacacgtacacagctaattttgcaggagacaacacttataaggctattagcaagtctcagaaagtggtgataaaa

SEQ ID NO: 16741 - DNA, 1560 bp, synthetic construct
  source 1..1560: mol_type = other DNA
tttatgagtggcggaaacacctccacccgagccgacaatgagctggtagtttctgcttttgtacacggcagtgagcccgagacaggctacgacccgatgtatggttggggagaccggggagagcccctgattcaatcaactttgatgaagatgaaccgcaatatgacctatgacaacgatttagctaccagttggagctctaacaataactttacggaatataccgtgaatatcagagatggagttaagttttctgacaacacaaccctggacgctgaggatgtggcattttcctataatcaggcaaagagtactggcaacacaatcgatctgagcagtctcgataatgcatccgctgtgaacaagaccacgatcaagttcaagctcaacaaacccgactcaacattcacagacaaactgctacatgtggggatcgtcccttcagatagctatgacaataatacttatggcagcaacccaatcggctcgggaccattcaaacttgcccagtgggacaaaggtcagcaagtcatctttgagaaaaatcctaactattatggaaaacagccaaagtttgataagttgaccatttcattccagaagaatgaagctagcttcaatgccgctaagaaccatgagctggatattgccgcagtcccactctcttacgccaatgagacaatagacggttaccactcctttctctccgaatccaatgatgtgcgcggcattagcctacccatgaagaacaatactggtgagacgaatgaggacggcatcgcgctgggaaacaatgtgactgccgacaagtcaatcaggttagccctcaactatgggattaacagggaagacatctgcaagggtgcactgaacggtgccggcgtccctaactacgatggtatcgctcacttcctcccatggtacaacaatgactccactatcaaggatgcagatattgacaaagctaaggatttcttgaagaaggggggctggaaggacaccgacggggatggcatagtcgaaaaagacgggaagaaagcctcctttaacctatactactcaagcgacgccccggagagacaggcaattgccgtcgccgtgagcgaacaggccaaagagttcgggatcgaaataaatgccacaggttcgaactgggatgaaattgataaaatcaaattcagtgaaccagttgtatggggattcgggagcactgacccttatgtgatgtacggagaatactacagtaatcaggcagggatcggatacaacaacccctcccttgtgaacaactccgctgtggattcacatattgataaggccatgtctgagccccgtgagcagagctatgctgactggagcgcggtttcttgggatggccagacaggcatctctcccaaaggggacgcggcatggctgtggataagcgagatcaagtacacatacttcgtggacgatagcctggatatttccaaagacaccttcaagctgcaacctcacgggggagaccttttcggcaacatctacgactggactcggatatctcctattaacgctaccaat

SEQ ID NO: 16742 - DNA, 1560 bp, synthetic construct
  source 1..1560: mol_type = other DNA
agcatgctgggaacatcaaatgacgatgacccgcgacatatcgtggtcactattcccgggcaaacgggagagcccgaagctggatttaacccattaaacgggtgggggtgcggacacatggagtttaatcctctggtgcagagcacccttctcaaatctgataaggacggtaacttcgtcaatgacctggccaccggatataacatcagttccgatgggcttaaatggactgtgggcatcagggatgacgtgaagttttcaaataataagtctctaaccgccaaagacgtagcttttacattcaacgaggcaaaatcgagtaattcacagttggacatgtctaacctcaaagaagctaaagccctggacaacaccacagtggaattcacactgaattcacccaaatccacgtttaattacgatctgagatatgtgggtattgtatctaaggaggactataataacgaaacttacggtcagcagcctatcggctcgggcccctacgtgctcaaacaatgggacaagggccaacaggctatctttgagataaatgacaactactacggggataagccatatttcacacaaataaccatgctattcccaaaggaggattccgcggcaatgcaaatcgccaaatccggccaggctgacgttgtccaggtacccattagcggcctcaacgagaccgtggaagggtacgagctcgttgagttcttcagtccacgtgctcaagggatcacccttccctatcagaacgctaccggtgaaaaaactactggcggaaacgatgtcggcaacaatgtcaccggcgatgtcgccataaggcaggctctgaacgtgggaatcaatcgggaagagatcgttgacagcgtgtataaggggcacgccctggtggagacaagtggtattgaccatcagaagtacaataaccctaacgcgattataaaggataataatcctaaggccgccaaaaagattctcgacgacgccggctgggttgatgctgacggcgacggcatccgcgagaaaaacggaacgcctgcaacattcacactgctttacagctctgatgatcaggccagacaggcaatcgcaacagttgtaagcgaacaggctaaggatctaggcattaacatcgagttggagggaactgattgggataccatctactcccgcatgtataaggaccctgccgtcttccagcagtcctccgataacccgtacaagaccacctacctgcagtaccacagtaaggataacctgtccgaggataactatatgaacccaaacgggtacgagaattctaaggtggacgccatattggacgcggcattacgggaaacagatctgaacgcatcatataagttgtggggcgacgcagccaatacggggagcggttatggattcggacccaatgaggacgccagctggctgtggattgcagattttgactactgctactttgtgaagaaggacattgacatgggtaccaaaccaactatgggtcaggactatatgcagaacatctgtgaatggaagcacactagcacaactgaa

SEQ ID NO: 16743 - DNA, 1617 bp, synthetic construct
  source 1..1617: mol_type = other DNA
atggataagaaaacaatcattatagccgccgtagctattctcgtgattgctggaattgccgtgttcgcatttggcggcggcggaagcagcgatagcgatccgacccacttgacagtagctacacatagcaatatggccgaaccggaggcaggtttcaacccgctcacaggttgggggtgcggacatatgaactataacccactggtacagagctgcctctttaagacagacaagaatggagacatagtgccagaccttgcaaccaactactcaattagtgccgacgggttaaaatggacggtcaaggttcgcgatgacgtcaaattcagtgataacagtacttttgacgccaaggacgtggcctttacattcaacactgcaaaggacacggaaactgatctggatttaacgaatctgaagaaagttacagccaaggatgacaagactgtcgtgtttgaactggaggaaccacggtctacattcatctatgacctgaggtatgttgggatcgtccccgaggagtatgacaatgctacctacggcgaacaccccataggtaccggaccttacgtgctggaccactgggataaagggcagcaggctatctttaaggcaaatgacaactggtatggtgacaaaccctacttcactcaaatcaccatgcttttccccgaggaggctacctggctagagctcgcgaagtccggtcaggtggacattgctccagtggccacctctgcacttaacgaatctgtagacggatacaactttgtggaaaagtcggccggccgggcacagggcatctccctcccatatctggaagatactgggaaaacgagcccagcaggagccaagatcgggaacaatgtgactgcggacaagtcaatccgagaggcattgaacataggggtcaacagggataagatctgtgaggaggtcttctctgggcacgcctcacctgagtataccagcgttgataccagaagctttgccaatcctaacgccaaagtgaaagatggggatgtcgccaaggctaagcagatcctcaaagaaggcggatgggaggacacagacggggacggaatcgtggaaaaggatggcgtgaaggcatccttcgacctgtactacccacctgattacctggaccgccaatctctggcaacagtttttgccgaacaagcgaaagacctgggcattcaagtgaacctccagggtgctgactgggataccatctatgcgaacatgtattccagtgctagtgtcatgcaacagacctcacccgacccctacaaatccatctaccagcagtatcatagcaaggaggccgatgacttctatatgaaccctaatctgtacaataatactgcttctgatatgttgatggagcaggccatgcactccaatgacttcaagctagcagactccctgtgggctcagtcggcccttgtcaacggcggcggctggggacctgctggcgatgctccctgggtgtggctagcgaactacaactacaactacttcgtgaaagaggatattgatatgggcgaccagcctgatggtctgggaaatgacttcttgattaatgtggttgattggactagaaccaattcaaccgcc

SEQ ID NO: 16744 - DNA, 1914 bp, synthetic construct
  source 1..1914: mol_type = other DNA
aacgatttagattcaaactcagtcaaccaggacaattatatctccgatgtagatagctttgatggttctaattcggtcctgtccagcagtaatctggatagcagcatcgataaggacaattatctgaacctggattctaataataatctgaacctggactctgacaagaactctgtgtccggtagcgacttgaacctcaataacgctgatctgattaacagcgtgtcagggtctgatctcaacctgaataacgctgatctgattaacaattcaacgaccaacgattcgagcaactcaaataattcaaacaatctcgagaacctcacgaatctcgacgactctaaaggtgcctccaatcagaagccccagaagtaccttattcccaatgacagtagcatcgggtctgcttacatccagaagatcattgataacgccgcccctggaagtacaatccagttcacaggttccttctacaaaaatatctacctgaaaatcgataaggctctaaacatcataagtaaaagcggcactgtgatcaatagtagctacaggctgccagtatttaccatatcaagaggaggctctggaacaaatatttcaggttttacagcaaatctggcaaattcctttgtcgaggccagtgatgtgtccgatatcagcatatcaaaaaataaaatctttacaaaacggaaggccattgtcctcgagaacgttttcaactcaaagattgtgaggaatagtttcctaagatttgaaactgccattgacatttcaaaatctggcggactgaccatatccaataataacataactccagacaacggatacaacgtgggtattagcctcaaagacatttatcgcgacaaggttagcatattaaacaacaatatcactggccatgaccgacgcatagaatccacaggcatttacttcgggccaaacgcgaagaacgtgctgattgaaggcaatatcatcgatgaatggtatactggtgtcgacttccccaacagcgtgaataacgtgtccattttaaacaacaccctcaatcacaatggggatggggtaatcatcaacggctggataaacaacttcacgtttaacaagaacgtggtcacaaataccggaagagttggtgtcctattcgactatgacttttacggaacaaaaggggatttcaccctggagaagaacttcttcacccagagcggacagttggatttgcgcaacaccggcgaccaggctgtaaccatcggggaaaactttgccagcagacggtgcgttagggtggccatgaagaacggattttccattaagacccggcaaaacggaaatggctattacttcagcattgtggacaagaactccaggggcgtcagcgggcttcctaacttcagtgcgacaatcagcatcaacggagtgtcctacaatgtcaatttcatcaactccgtggcttatgttgaggttgacggcgccagcggcgaaaacgatgaggtccttcttgacgtgggggaggacaagcgtaagttgagcgactggggcgagactcaaaatctcagttccagtgagatggaatactataaaaagatctacgacgacctgatcaaatctatggtagaagagactaacaatgataatcaggacatgaaaaaggtggaggataagaacggaacaggctccaccccaagtgggggtaacggcggaggcgactcggggatctcagacgggcggtcctctgtgagttccaatggagactccagccctgcaagtgctggaacttctaacgtggcagcaagctcggcctcttcttctgcgggcccctctgcagctcaagcagacactccggagagttcgacggtgaagtcattgtcccttgatgaggaaacctttcgagttgccggggtgggtggcctggtc

SEQ ID NO: 16745 - DNA, 1986 bp, synthetic construct
  source 1..1986: mol_type = other DNA
gcagatgctgatgtcacatatataaacgatgctgccgatgtggacgatgttgccgacgagaaagttgctccgcttacagccagtgcggatgcccaggacatccagactaagctggataatgccaaacctggagacacaattgagctggagaacaagacatatgacgttgatacaacatttaatgtcacgaaacaggtgaccatcaaagggcaggacacggtcataaaggcgagcggtgcctcccagggtggtagcggagcactcttcatagcaaatgaggctggcacggcttttgaaggaattacattcattaacacagacggccacaaaaattatggcgagcaggtgtcaggctatgctatccaattagctatcgaaaacggaactgtggacaactgcaagttcatcgactggagcagcggggtctacggtaaaggcgcctctttctgcagcattaccaactcttacttcaacggttcatccgagcaggttaccaatggcgggaaaaaggagtacggtactaaagccattaacctcatggggtcccatgacataaccgtgaccggatgtacctttgagggccaagtgctggacgctatttccattgccagtaacagcgggaacaacatcatgaccgacaacacttttatcgacaactgttatgctatctacttcgggggcgcgtccacacaaggatgcgtgatcgctaacaacagtttcatcaggtgcggctactgtgtggatgacaaaggaaacgtgatctttaaagatctgcctataatctcgactcagaaagcagctaacggatacatcatcgctgataacactattgaagcaaatgaaggatctatctttatgaaggctgagtcagggaacacagcccacgggtacccaagtaagatcggtgacataaacattacaggcaacaccataaccgcaactgcaggggccaatcctgaaggcattacattcatgtacatcctgagtaactctgggcccctgaacccatatgcaccaattgcaatcgtgaacaacaacctcgacgccggcattacccccgtcaccgtgtggtatgccgactgggacaatgaaaatgggacagtgattcccgccgccgataaggcagtgacctccatcaacatagcagagatcgctgcagccgatggaaccgtcacggtggaattggtagacgtaaatggcgccccccaggccggccaaaccctgtcctataaaatcgacgatggcaatgccactgaaatcgagactgatgagaatggtaaggctgtgatcaatgttccaattgatgagaacgctactgcccaaactgttgccgtggagtttgccggaactaacgaccttgccgccagcagcgctcaggtttcattcaagaacactgcaactaagagaacagccacccagatcaatgcgaacaatatgtcagtggtcacattggcccccaataccggtgacacaaatgacaattacttcaatgccaccttgctagatgccgaaggcaatccgctggtcaacaaggaagtcaaaattggatttaacggtaaggagtacacaaagaccacaaatgaaaatggtgtagcgcagcttaagattaatctaggatacaagggcggatacacctttgctgtagcattcctcggggacgatgaatatgaggcatcatttggggtatacctgattaacgtcgccgcgcagactcctaagctgactaccaaggcggccacgtacaaggcatccgctaagaccaagtccattagcgctaccttcaaaaccgagcagggcagtgtgatcgctaataagaagatctcgttcacggtgaacggcaaaacatatactggaacaaccaattctaagggcgtagctacggtgaaggtcagcatcaataagaagggaacatacagcttcactgctaaatatgcaggggataacacctacaaagcagtgagcgcaagcgccaaactcacgataaag

SEQ ID NO: 16746 - DNA, 2067 bp, synthetic construct
  source 1..2067: mol_type = other DNA
ctctcaaacagtaacacagatagcagtgacaacgcatcagatgacgcctccggcagcgagatagtgtcaggaatcaacgaggagctggaatcgaataatcttctgactgaagatttaagcgtggacgatgtcattttacaaacgagcttttacacaagttatgcagttaaatctgccaagtctcccactgtgttaactttcaagaactctacagtggtaaagggcgacaaactgtacatctacctgaaagacagttccaatcatggcatttccggcgagaaggtaatctttaagttctcaaattcctcttatacacgcacgaccgattcaaacggaatggccgccctggacattaagctcaatccaaacaagtatgctttttccgccatctatgatggcagcgataattatagcgcttccagaaaggactttacccttactgttgcgaaagtcaatactaaattgacttcgagctcaagtgtggtgaggggacgcaacctatacacttatctgaaggataaaaacaacaacgccctgtcgaacaagaagataagcattaccatctctgggaagacatataccgtgactaccgacaaaaacggccgggccagcctaaagctcagtcttaagaccggcacttactccaccaaaatcaactttgctggcgataaaacatataactcccagtctctttccaagaagataaaaatatacaccctcaagacagtcatgacaatcccaagtacgagcgttgtccgggggcagtacatctacgcatacctaaaggactccgacggtaatgccctctccgggcaaaaggtggtcatgaagttcgacaagatctactttaacctaaaaacagacaagaacggacgggtagccctgaaaataaataccaggctgggaaaaatccccgtaaaagcaagcttcgccggatcaacatcctacagcgccagctcaaagagcgtcacgattacctcttacgttgagaaaaccaagattacagtggaaaattcaacagtgaaacgaggaaagtacttctacgcctatctcaaggacagcaaggacaaagggatttccaaccaaaaggttaagattaccctggcgaatataaattatactaaaaccacagactccaatggtaaagtcgcattgaagatcgaggagaaccctggtaactacacaataaaactcaactttgctaagaccaacagttactatgcaagcagcaagagcctgaagatcaatgtcctgaataacgcaacggctaaaatcatagcaaaggatcagaccgtgctgggagagtactctgtccgactgaccgacatgaacagtaatccattggcaaatcagaccgtggagattactgcagctacagtcaaccgtagtgtaggctctggcttgcccattactaaaaagactgttgtgatcaattctgacaacatctataacaaagctaccgactcgcagtttattaagtccattggagaagtcctgaagtccaagggctataaagtgattatcaattcaaacatcgggccgaatgctcactgtacagatgcaatgggggcttactctgatgtttgtatcttctgcatcttcggtggtgtggacagtggtatgttcgttgacatggccgctagttggtaccagaatctgctcaagaaatacgacaatgaggtggtgctggggttcacccacacgcagaggaacctcgccacagatacatggcttgaaagagcgcacgacgatgattacagccccaagaacttcactggcttgtcatatcctggaacatacctcaacgattacgacatggactacgtatatggtagaaccgccacagaaatggcgaataatttcatcaaatatgctgtgaacgggcttagcattgggctgaacaacactgtgccttgcaatgtcatggaatataatgtcacgaccggcgataacggctatgccaccatcaccgatctgttgccaggggattacgctgtgatctcttcttatattaacaagaccgccggatacgtggctgatactgtgatctccatcattgaggtgaaa

SEQ ID NO: 16747 - DNA, 2328 bp, synthetic construct
  source 1..2328: mol_type = other DNA
agtgaaaattcaatatctagcgatattaatgataactcactgattaatgaattcacagcctcaaatcaaatcaacgacaatatagccattaatgatggcctgagcaaaggcgacaaatcccaactatctgaatccaaatcaatttacgtgtccacaaacggcagtgacgattcaggtgacggaagtgaaaagagcccataccaaagtatcaaacatgctgtatccaaggccgatgatgattcaatcatttacctatccagcgggacttacaatggagagaataaccagaacatcagcatcggaaaaagcctgagcatctatggcgaggattccactataatcgacggtgaggacaaggcccagctctttatcatgaattccagcgctaaactctccctcaacggactgattctgacaaacgcctataaggacggcaacctctcggactatggcggagccatcatcaacgagggcgggcaattgaccataatcaactctacgatcaaaaactcttatggcaactactatggcggtgccatctacaacaatttaggacggttgaccatcataaactcaagcattctgaacaatagcgcaattcagtatggaggtgccatctatacactcggtgtgacaaacatccagaactctgttttcgagaaaaacaccctaacggctgagaaaggtgtgggagccagcatcgccgcggggggaacaatcaccctcaacaatacggatttcctcaataatcatgcgatatactcagcggcggcgctgctcagcctcggcaacgcaaccatcaacaactgtagtttcatcaaccagaccacaaactataccgccggggcaattagtaatcacggaaacatgtttataaacaactcccttttcttcaattgcagagtgagattttatgccggggccatccttgcacctccgagcgggcaccatgtcgtgacagaggtctacaatacaatctttgactataacaatgcaggaaaccacggggcagtcacgaacaacttccaagatgcagagattacaatgattaactgtgcaattaccaataactacatccagaagaacgttttctatggagatattgctttggacgacaacgctaccgtccagtactgctggtggggccagaacaacattagctcttactactattcccctcacagtaataatgaggatcccggtcagatcaacgcttcccgatggctgatgatgactttcacctcttcgaatggcaacatctcagcagacgaggtgaacacattgactgttagcattaagcagtactttgacaacgataccaaggagatatacgaatataacgaggatatcaacctaccccttaccgtgaaatttttcgacgacaacaaaaagaccattgctacaaaaactctgaagaatggtacagcctcctacaattacatcccagtgaagggtgtcaatgctgtgtatgcacaaatcaccaacgaaatcattgagattcccgtggtccagaaaaaggaatcgaatcttagcaccagcaatctgaccaaatactacaagaatgagagccagttggaagccaaactgaccgatggcgacaataaccctctgtccaataaaactataagcatcgaactgttagggaagacatacaataagacaacgaacgaaaacgggatcgttaaacagaatatcggcctgaagccaggccagtacactgctaacattattttcaaggaccccgagtacaaaaacaaaaacattacagtgcaaatcactgtgcttaagaacagcactagtatcagcgctaaaaacctggttaagtactataagaacagcagccagctgactgtcaagttgcttgacaataataagaaggccatgaagtccaaaaaggtgaaatttaccattggcaaaaacacttacacaaggaccacaaatgcaaatggggccgctacgttcaacatcaatctcaaggtgggcacatataatgtaaaggtttcatttggaggtgatgactactacaagggatctagtaagaccgtcaaggtgactgtaaagacaaccaagatgcaggccaagtctactaagatacgcaagaactctaatttcgtagcaacgtttaaggacgctaatgggaaggtcataaagaacactaaggtgaaattcactttaaataaaaagacctatacgaagacaaccaattcgaaagggcaggctaccctgaaggtgagtgtaaagctgggctcctatactattaaaagtcagtacgcttccactaagacctatggggccactgtctttaataccaaaattaaggtggtgaag

SEQ ID NO: 16748 - DNA, 2499 bp, synthetic construct
  source 1..2499: mol_type = other DNA
aatgatctcggcaccgtgttggaggataatgataacaacggccttaatgacttaaataacgatgactttatcaattcagatgtgaattcggatagcataaataaagaagcgatttctaaccttaaaagtttaaacagtcaggatgagtctacatcttctgattctaataactctgctagttcgaatagcaatagttccgttgcttccagttctaatagttctgcaagctctaattcggctaatagcaatagtagcaccagctctaactcggctaactccaacagctcggtgagttctaactccactaactctaatagtagcgcaagttctaattctactaattctaacagttctgccagttcgaattctactaatagcaatgctaacaccaataactccagttcagatgcctccaaaactcaaacgatcaaactgtcctctcaagaggaaagcgccctgaacgagttcctaaatgccatcaaaacaactactaagggcaccattgtgctaaagaacgatttggtcctgaaccagaccatctcacttaataacaatattacaatagacgggaggaatcattccatcagctcccttgacgtgacaaacatgtttaagacctttgcaaagatcacactgaaaaacattgtctttacaaactaccacgaaatcgagaacctgagagccatacttaactctggagaactgacggtcctcaattgccagttcaatggctttagttacctgacaaacggctcagctatctataacagcaaaaagctcaccgtgcaggggactaagtttaacaacaactatgtgaataacagcggcggggccatctatagcaccggaaccctgaccatcaacaattcctcattcaacaagaatcacgccggcaaaaatggtggagccatctattccactctgaacctaatcctaaaccagtctgtctttagcaataactccgctaatgaaagcggcggagctctctactcaaagggcagcggcctgaacataaagtactcccgatttaacaataactcggcctccctcaacggaggtgcgctctacagctcatccaacagtacggtgatttcctattcaaatttcgtgtccaactttgtggaggcctacgacaaagcaagcaatggcggggctgcatttatctactatggaagcaaaattgcctatagtaacttcaccagtaaccattgtaagacaacgctgacaaacagttctcagaaaaagtcaattcagtcaatggggggcgctctgttctattatgggggcaaccacaccctgagcttctctaactttaacaagaactctgtggagaacgacggaggggctgtgcgcatagccaaaaatgtggggaaatttacactcaacaaatgtaatttcaccaacaacaacgcatcctacgaggatgggggagcaatttccctcgccaccccaaacatcacaatctcaaactccattttcaagaataactttgcaaatgaggacggtggtgctattgacacattcagtctcggcagctacaaggtaaatgtgctcattaagaattgcctattcaactcaaacacggccttcaaggcagcgggcgccatctaccttggcgtaaacactgtgcagtcaatcgtgaactctaacttcacatcaaataaggccaccgttgcaggtgccttctatatcgagtccatttcagtgagcattagcaactgcatcttctcctccaataaggcagacaacgtatccaaaaagacaatctataacaagcaaggcaaggttgtctcccactcaggaggggctgtattcgttaagaatggaagtacagtcaccattaaaaacagcctgttcaagagcaataaggccacatcagggggggccatcaccaatcacggaaagatggtcattgacaagtgcaacttcaccagcaatagcgcgacaaacggtggggccttatacggcggtggaaaaacaagcaccatccggaattccatcttctacaagaattcagctacaaaaacgggtggagcgttattcatcaacgaaggcaacgtcaatatgaaaagcagcatgatagtcagtaacactgcaaaatcctactctgtctacagcacagtttccatcaccctgaacaataactggtggggaaacacattgtccattaaggacaagtcccccaagactctgggactgaccaatgttaaggtgagcacgtggctgcatttgaaaataagggctaagaccactaagctggctaaagggaagaccaccaccttgactattgacctcagatacaataataacgacaagcttgtatcaactgcgtttaacaatcctctgactttgactgtatctgaaggcactctgtctagcaagaaagtgaacctgaaaaatggtaaggccacagttaagtttaaaaagaccaactccaagactgcagtggtgaaggtcaagctcttgggtaaaaccgcccggtgtacgataaagactaaa

SEQ ID NO: 16749 - DNA, 2742 bp, synthetic construct
  source 1..2742: mol_type = other DNA
gagaatatcatcacagcagatctaaattcaaacagcaatgagcttaattccgatttcgcctatggtgactcagactctgaggaaatcctggacgaaccctctcagaagctgaaaaccggttccgataacagcgattttaaagacatccagaacttaatcgataacgctaaggaaaacgacgtaatcgagttgagcggcacctacacaggggattctctaattgtcgtcaacaaaagcttaacactgaagtcttcttcaagtgccacactcgatggagaattcctaaacgaattgatggctatcaatgctccaaatgttatcctggacaacatcaacttcataaacgccaactacactgggctgagtgtgaacaacaactatgtcaccattcagaattgcaactttgacggctgcatcaatggcgagctgggatgtgccctcataatccatgggaataacgtcaatgtgctgaactctaacttcacaaataatgtggcaaataagtccagctgtcaccatacggacggggcagccatttatcttattggaaacgactgccagatcgacaattgcagtttcataaacaattgggggtacaacttcgagacatccagctcaggcggggccatctggatcaagggaaataatattgtgatcaacaactcatatttcttcaataactccgctaccgctgaagtggggtggacattccacggggaggagatcacctatctggcagacggctacggcggagcagccttcttggttggaaaaaatgtgaaaatcatcaactccctctttgacagtagcctctcgcacgcgcaagggggcgcattgtactataagagcgcatacgattgttcaataatcaattcaacctttctgaattcattttccgtgggagagggaggcgtcatctatctcggtcagaatattgatgggctcatgatcgactcttgcaatttcataaacaacacagccgacggtttggatggagtgctggtcaaatacaccgacctcggcagcgtgttgtatgctagcaagttcgctgagaacgtagtgatcaccaattccagtcttctcaacaacaaaggaaccagcgcagtctacttcttaggcaataacctgaacatttcaaattcaatcatcgaaaataataacctatcaacggcagtcatctacatgaatggaagtatgaatgacaatttctggtctaagaactttgatagcgctgacgagtttaagaacgactgcttcattattcgagataatgagtctcaagtgcccgacacgtggttcaacctcgtgtgtgatggcttggacagtctgaaggcgaagggggtgtatgattacaacatgtcctttgtcctgaaggatgcttcgttggacaatcacgcctccaaaattagcctgaccaacaacctgcccaactatcatattaacctgaaaaacagtgccaagaacaagatcaacccaaatgaacttgtgattgttgacaaccaggcagacttcacttatgactacattgagtctgccaaggattccattgacgtgtacgatgattataacaacctgatcctgtccaagaaggtgctgtctggaatcacttatatcaacgatagcggcaatgatacaaaagaccttcaggacgccattgactccgccagttctggttccctgatctcactatccaataagacctacgtgcttgacacaatcctgataaacaaggatattcacataagcggtgaagaaaatacaacggtcatgctctccaacagttccgattacatattcaaaatctcgaattgttctgcggcaaactattctgactacggcatagccatttcaaacatcaacttcattttagacaacggcgacattgttgccctggctgaggctgtcaatgggagcggctcactctctattgatgttgcgtcgataaagatcacagacaacagctttacatcccgggagggggtagtgagggaatccattacgattctggagcttgacagccaaagggctgtcttagcaccgaccagaaacatttctatctctaataattccctggagatcggaatgaacccatttgattttaacgtaaagagcgtcattaacggctcggatgtgcgggtggatgttgggggcaatctggccagcaaaaaagccagtcagatcatttgtaaagatatggtcactaaagccattgcaagcaacgtagactcccgcagcggcgagtactttaacgtgagcctgaaggatagccagggcaaacccctacaaaataagtttgttcagataggtttcaacggtgctgtgtacaatcgcaccactaacgaaagcggcgaacttagactccagataaacctcgcttacaaaggagtgtacacatttgccatctcctacctgggtgacgatgagtgcaacggtagcttcgaagtggcgaagataactgtcaatcctcagagccctatcctcatggccaataatgcaaaatataaggtatcaagcactaaaaccctttctgctagttttaaatccatgaaaggaagccctatttctggcaagaccatcaagttcactgtagatggcaagacttacagtggaaagaccaattccaatggtattgctagtgtgaaggttagtttgaataagaaggggacctataaattcactgccaagtttgccggagacaacacttttgccgcggtgactaagtctgctaaggtggttatcagt

SEQ ID NO: 16750 - DNA, 2769 bp, synthetic construct
  source 1..2769: mol_type = other DNA
gatatctccacaattccaaatgacgaaaaggttagcatcaatgaaaacgactacgacaccaactattatgagcttcctgataagaaattagatcacctcgagtcaaatgacaatcagaatcatctggagatgaatgacaaaaagctcaacgatggcaacagtaacaacgatttcaactatatacaggagctgatcaacagtcacaaagatggagatagcattttccttgaagacaaaacatatatcggcaacggaagtccaatcatcatcaataagaacctaaatatttacgggtacggctataaaaacctgtccgacctggacattaaaacgatcctggacgggaactccaagagcaacatctttatcatcaataagggcattcaactcaacctgtatggccttagcctgatcaatggaaatacgagttacgaggacggcggggccatctataacaatggcctattgagtattgatagctgttcaattagtaacaataatgctggcgggggggctgtgtactcctctgagggctcagaaatcgaaatttacaacagtctctttgagaacaatagcggactcctgggcggggccctcgacctggaaaatgccaacgccataatttccaagtccacattcaagggcaaccgctgcaatggagacggtggagccatttacaataatatcggaaagctaaccatctctaattcgaccttctccttcaacaagggagctaggggcggtgtgatctacaacaatcacggcaccctatcaatttacgattgtgagatgttcctgaactctgcaagccagctagggggtactgttaaaaattgggggagctgtgaaatatacaactcgacaatcaaaaacaacactgccgacatgtacggcggaggcctctacacctttgagtttaagatgacggtgaatgattgcctgatcgagaacaactatgcggatgaggggggaggcctgttcgcagatgcagacagccgattgatcgtcatcaattccaccataatcaacaacaatgctaaaatcggagggggaatcgatgccaagcaagcttatctgactgtgaacaactcttcgattattaacaacaacgctaaaagcaatggaggcgggatctacgctgacaagcaccctgcagagatccataacactaacataaaggacaataacggaaattccggtggcggtgtcttcataggtgacattagcgcaaaaattagtgactccaccctgaacggcaactctggcgaaactggtggggcaatattcaataaaggaaaactcattattgaaaagagcaccctcaactcaaatgaggccaattacggtggagcaatctacaatcagaagaacctcaccgtgaacaaatcctcttttgacagtaataaagcctatgaggctgcgggaatctataaccttggcgactttttaattgagagctctaacttcaccaaacaatctgtgagccacaaagcaggggtcatccttagcgtaaacggaaacatcaagattaaggattccatatttaagcagacaagcggtgccgatgaaggcggagtaatctttacacgggaagggaatatatttatagactcctcactgttcctcttgaacaacgccctgagttacggtgctgccattgacaacagcgcaatcatgacaatccagaactccctgttcagcagaaacaaggcgtttggtgccggtgcaatcgacaatgggggagacttgactgtcacgaactccactttcacaaacaacaaggtcacaaacaacggcggggcgattgacaataacggcaagctgtacatgagcggttccgtgctagtgaacaacaccgctcagaactacggcggcgccatcatctctagaaaggatacaaatatagagtactgccagatcttggataattccgctcccgagggagacgggctttatgacagcggggactacttactgataagcaacaactggtggggggaaaacaaccccaactttgatgagctccttaacttcaacattgacgaagacttcaagtggattgagatgaactttaccaattcaaccccccttatgcaaaaaaaggtctctaatttgaccataagcctgaatggaaaggataagaacaacaatagcttcaagctggagaacccagataaactgcctattctgaagtcaagtatccaggtggttagcgaagacagtaaaatcaagtacaacttgaacattgtgaacggttcagcttcgacatcaactgatatgaagctggccaagacagtaaatgccattttggataacgagattgtgagcttagatgtgctggaaaacaatgaatcggatgatgactccgaggattcagacgactcaaacgactccaacgatgagtcagacaatccgaataattcaaatgataacagcgacaacgttactgatgacagcgacgactccaacaagtccaataaccccaacaatcatcagagcaacggcaataagaataatgataataacaagaattattacaataagaatggtctgaggtattctaaaatgaaaaacagtcttctgaattctattgatagcaatttagacaatgattatctgaatctcaaagagaacaatgaaaataacgatgatagtaactccaataataaggacatgaattattctgataagaaaactgatttgaacaatgagagttctaacaaggagatcgacgaaaatgagaccaaactctttgacatcaattattct

SEQ ID NO: 16751 - DNA, 3093 bp, synthetic construct
  source 1..3093: mol_type = other DNA
tccgaggatatcaatacagatatcgacacggactatcaatctgatagcattgatgtgtctgatgtgagtctgaatgatgagcagatagcttctgaggatagtctgcctaactacgagattgctaataaatccaaggacaaactctatgatgaaggggaggaggaggagggcggcataaccaatgacgatgatgatgaaaattatagaattgatgggatctatgcagattatacaattacgccgtctgaaaatgggactatctttgtggaaggagagcggatccagattatctttaattttacagatcaggactatgagcccgtttccggagactggtttattaatttttatggtgagagtaccgatgtcgacatatatcatccttttgaagctaccgggctcaccgactacgtcgttcctatttatttgcctccaggagactatgtcatattcttttacgagggcgtggtttttgacgactttggtgggatagaagatgagggcactcaattagatgtgacttttgaggacgctgagggcaaccagttagataatccggaattctctatccggaccaactacaacaaaaaggtatatgccaatcttaccatcgactacagtgtggccgaactggaaaatctcgtggaaggggacgatatcactgccaagataagcctgatggatgaattcaacaacaaaatgactgagaaggtgaacttggagatttacaggaatggggagaactacgactctaagaaggtgaacgtggtggagggccaaaataacaacatcatcttcgaaaaccttcaggaggggaactactcactggaagtggcgagcattgactcggttccaaagtacacgaacatcatcacgaaagccgtcaacttcacagtcaaatccaactatgacccagacaactaccaaatcatcctcaatcctgaagacgagaaaaagcttgtgggtgactcatatgaaatgggtgtgaaactactcaatccatctgaagaggccgaggaaggcagcattgacctgtacctcaatggcaactttgtaaaaacactggaacttaactatgacgaagacggttactcccaccacattgtggaaggccttcagcttggccccaacaatgccacattcctataccagatcagagatggggtgaacgtaagcgagtcagtgaacctaatcaggtacgaaaccgagtccatcatagacctggagagctcagatatcattatcggtgacgacgccaagatcaaggcctccctcagttacctggacgggatcgtcaaaaagccaatcaacgagaacttcaagctgtacatcaaaaactacgtggaggatgaagatgaggtcgagtttgtctatgatgaagagtttaccatcaaaggatccgagacaataactctgagcgacctagaggagggcacctactacatttcagctgtttacaatggtaagaactacaaatacctagcaactgaggaagaaagcaccctggaggtattccctaaggagacaagggttgacgctgtcgcccggacctactcaactgaagagaatgtgattgtgggcatcgagttggctgacttgtctggcaaggccatcaaaggcactgtgaatgtggtcctggacaacaagaccagttaccaggtaaacactaccgatgacatccagcatcccgtggagttggaccttggcaagttaggctatggcctccacaatattgaactcaactacaccggagacgatagcgagggctggctgccttcgtacaacaatgctgagttcctggttatctacccatccttcatgagcattgaagatggagacgtcacctccggctcggacctgactgtcaacatcagcctgacaggccccgatgatgagggaatcaacggaatcattacagtgcgcatttacgacaataccggaaaatatctaatcaacggcgacttcaacacaaccaacggagtgaaaagcattgaactcaagaacatcactaaggattatatcatctatggtcgctactacgggttggataccagcaaaattgaaatcgggcccagtaatcattatttgtcgagcgaggcttatggattcattagaatagctgaagggaagtccgagaaaaccgaatatgacctggaactgaccaaggtgaatgacaacacagtgattgccagcctgaaggactccgattcaaagcccgttgccaatgcggagctgaccgtcaaagtgaatggggtggagtccaaagcgaagacagacaataatggaatggccaacattagcttcagcggaaattcatcaatcaaggtgagctatacggatgctaacaacacaactgctaaggcatctatggagatcattatcatcaacaatgttactgaaaagattgtaaaccagacagtggaggttccggttgaaatagagaagattgtctatgtgaaccagaccgtggaggtccccgttgaggttgagaaaattgtctatgtcattcccaacagaacagacacggccttcgaatacgagaacatggtgacaactgcagtggcgtctgcggatggccgaacaggggaatacttcaacgtccgactcatcgacgcaaccggtaagccattagcctacaagcctattaagataggattcaatggagtcgtatacgacaggaccaccgatgcagacggacgcgcaaaactgcagatcaacctcggttataagggagattacaccttcgcaataggcttccttggggatgacaattacacgggagcatttgaagtagctaagataactgtgaaactgcagaagccacagctgagcactgccagcaaaacatataaggctagtgcaaagacgaagacattgactgccaccttcaagagcgagcacggcaatacagtcagtggcaaaaagataagctttacagtgaacgggaagacatactccggaacgaccaattcaaaaggtatcgccagcgtgaatgtaagtctctccaagaaaggtacttattcctttactgtcaaatgggcaggtaacgaccaattcgcctctgtaacaaagagtggaaagctgaccattaag

SEQ ID NO: 16752 - DNA, 3774 bp, synthetic construct
  source 1..3774: mol_type = other DNA
gcggtcgagaacgactatagcaatgctgacctcgatatttccaacgattttgttctgtctgataacagcaacgagatcttgattgacagttcgggctcccttgatgatagcagttccgcactggtttccgaagggtccagcaatggcctggattcttattacagcaatgacctggtgctcaacgatagcttgtctagcaggagttctgtcattgaggacagttgcagcatcgattcaacaaccatagaggacaaggctctagagaaatccttatcgtctaacgaactcgcagaaggcaccaagacttacacagatctattgaaggatatcaaatctgctaaaaacgtcctcaacttgaagtacgactatatttacgactctactatcgacaagtctcttaagaaggggatcgtgctcacttttgacgaggattatgaactcaccataaacggcaatggtcatatcatcgatggtaacggtatagcgggtgggttcaacttcgaaaacggcgagttcgttatcaataatctctcctttcagaactgcaaaatctcgtcattgattctcacctcatgtgatttcacgaccaactacgtgactttcagtaataattacgataaatcgagtggagcctgcgtgtaccttgacaattcatatttttactcatctcatgacaactttatcgacaactacgcccctagcggttctgccatctatggggaatgtagcgtaatcgatgtctacgatggactgtttgagtcccagaagccaatcgattggtcgtttatttatggctgggacgagaccgagatctatatcgaggattgcctgtttcggaatactgtgagtaattatagtaccgccgtgtacggggattatattattgagatctctaacagccatttcacaaacctgttctctaagttcacgggaggcgccataggagttcgaaatgcaagtcttacggtagaaaaaagcgagttcaataatgtgtccagtcttagaaacggaggggttatatacgcagatatgaatgtggacgaggaaaaatcctctgaagaaaccatcatcaaggactcttcattcgtgaatagtaagtctgacttcggaggcgctgttcttcagctaggcgggaaattgaagatttatcgctccaatttcaccgagaataccgccaattactatggcggtgccatctacacttccaatgtctctttttataccagcaaaagcaaattttcaaacaacgtcgcaaatgagatgaagggatctgctatctactttgacaacggagacctcaagatcgaaaacagcaatgtgctgtccaacccatcatgcgaaggcgccatttatatctacgactctttctataacatttccggatcgaccttttccaacaacgatgtggcaatccactcattctttgatcgcactagaacggtgaagaatagtaaaacagggaagtcaacaaccgtgaagtccagtctcaacaacaatacatgggggggcgaccggaacaagctgaacaatgtggaatacccctacttcgttagcaaccttggccaggatattattctgaaccctgtgaaaattaacgccacaataaaggacaaatatttcaacttggtggacctcggcctggtgacacctgtaaaggaccaaggcgactctggagcctgttgggccttcggaggcgcggcggccctggaatcagctattcttaaagcaacaggagtgtccctagacatctccgagaacaacatccagagtgcaggactgagatatagcttgtacggcaaaccttctctgacagaaggtggatacgactacactgctttggcttactacttgagttggctgggaccaaataactcctccattgacgagtacgaccagtttgggaagatctctccgcagctattttccgaggataactatcacatcctggacgtaatattcctggacccagcaaacacctcctccataaaagacggcttgattaagtacggggcccttagcgcaagcgctaacggtgctgatagcgacagtaacgacttcttcaacgagaagacatacgcacagtattgtaatgatgatgaagccagcgccaatcacattatctcaatcgtcgggtgggatgacaactacagcaaaaacaatttcctgatcacgcccaaaggcaatggcgcttggattgtgaaaaatagctggggttcagattggggcaaaaatggctattactacatctcatattatgatgagtccctgcggagctgttacgccgtggcctatttgctgaacaacacgttaaggtacaataagctataccaatacgatttaacaaattacgacgactttgatgacggggactacgatggggtgatttattccaataagttcaccagcaatggcgacgatctgatcgccgccgtcggcacttacttcgagtatgaagacgatgactacgtaatttcagtttatgtaaatggcaaaaaggcatatcagcaaaaggggacttctgcgtttgtagggtataatactatcaagctaaacaagtatatcgctgtgaacaagggcgagacctttacagtggctatcagctccagcgcaatgccctacgtcgatgacacaaggatacacctgccgaagggatcatcttttctgacagttgacggtgagcagattgacctcagtcagagggggcagatagcatgcatcaaggtgtatacctttaatgatacaaagatcacccgagatcaatctacctattacgggtccgataaaaagctcgccatagagagcgaactggaaggtacaactatctctctgacagactctaactgcaagtccctcggatcagccaaggtcgtcgacggggttgctcagttcgacctggtgctagggccaggcacatacttctacacgagctcttatgccggagagaagattataaactcctttaaggttttctccaccattggaggggtctccaacaagaatatcggttacaaagcgaccgctagcttcagccttagctttaaagatgagaatggggagatactcaacaactcacaattcacttatacgctcgatggcaagagcaaaaccctgactaccctggacgacggtacctacaacatttcattcaagaatcttgctatcggaacccacaagctgtctgtcaaaaatctgattagcggacaagtttctaacgctacaataaaagtggtgtcgagattctcaggagcaaaggatatcagtatgttctattttgatggaacatgttacaaggtgcgcattatgggtaacgacgccaaggctgtcggcaaaggtcagactgtcactgtcgtgctgaacaaaaaaacatacaagcttaagacggacgccaatggttacatctcattaaagattcccaatactctcacccccaatggcgcaaaggccaaagtgtacagcataaaaatgacatatgcaggacagagcctcagtaagaaaatcacagttaaacaggtgctgaaaactaacagtctgaccgtgaagaagaaagctaaaagtttttccattaaggtaacactgaaagggaagaccgtcttaaagtacaaggtcctcaccatcaaattcaagggaaagacatacaaggtcaagactaacgcgaaaggaattgccacactgaccttaaagaaggctgtgatcaacggtctgaagaagggcggcaaatatacttttaccgtaacctatctgaaagacactatcaaggccactgtgagtgtgaag

SEQ ID NO: 16753 - DNA, 3807 bp, synthetic construct
  source 1..3807: mol_type = other DNA
aatgaggatgtggacaacggcttgatcgattcagatgactcgatcctccagagcgctgaggtctctgattctgccattggaagcgactctatcttgcagtcagctgaggtctctgattccactattgagtcagactccattgaactggaggataagggtaacgttttgaagtccagtgacaatgcttccttcgagctcgatgacaaaaataatataggaagcgcagattctgagttggaggacgattacctggaacctaaagaaaagaacgttctttcaatggacgagaatgcatggttttacaattatattgtgtggtacgatggtgatgacggagattgggtgtcccttgactttgtggatgatctgaaaaaccccgaaaacatcaccatccgattgaacagttatgacacgccctttgacggtgtggatctggctgttataaatgattatgactactcaatcacgaaactgaccactgatgacaatgggactgtagtgtataacgttccatatgaggtcgacgaactgagcgtcttcgtaggcttttggtatgacggggactttgtggccacttatgggaattgggaaagttacacaatctgcgccgtgaactggggcacgtggtatagggacccttcgaaacggacttacgacttttacgtctctgtgagcgacatggacacctacgaaagtccaattggcgcccaggtggtttttaccagcgattccaatcaatatgtcgggacaatagatgagaacgaacgcgccatcatcccaaaggtcagctacggcacatacgatgtgaaggtcatctacgacggctattgcattctcaacctgagcgattctagcgccattgagttctatgacgaccatcacaccgaccctgattccctgggggatgaaaggatagattatatgtacgtggatagttccggcgtagtatatctcgacctgtgttatgacggttctctaaaagtgccagacaactccacttatgagccctacggggacgacaacccgtccgggggcggcagtggcaaccaatctggtggaactgtggctaatggcacattcacctcactgcagagtctgttcaaccgtgctgcagcaaattcaacaatctccctaaccagggattacgtctacgacgatggattcgacatcaaaggaatcgtaattaacaaggacctgacaatcaacgggaatgcccacacacttgacgccctaggcaaatcccgaattttctacgttaacaatagcactgtcaagttcaacaatatcctcttcgccaacggtaatgccactcttggcggggccatttataatggaagtgccgtaaactgtctttttattaacaatactgctcaggatggtggtgccatttattatggaagcgctttagtgtgtgatttcataaacaactccgcatcgcggaacgggggcgctatctatagtggcggggccgtgaactgtagctttatcaacaactcagccaacttggggggcgctgccatttatgactccttgtttgctgtgaattctactttcgtgggtaataccctggcttctagcaatcctaccggaggcagcgctaccaccgatgtgagtgtggtgtcctttaacccaatcactacctatatacccagccctccatccatgacaggatcaattggttgggggggggccgtattagactttacaaggcccgtgatctacacggattacaatgaaaccttctacctgctgacgaacttcactcttcagcaagatggctttaacaattacggcaatgttcagctgactggccgggacttggtcttcaagagcctgtatccctactctggaaactattcaatggctcttatcatctctggacagatctttactcctacatatgtccttggggagaatgacacttatgaagcccattttaaactgaacggtctctctctcgggctacacatggtgtacgcgtacgtggatttcgggtacccggaatattatagctatagaatcggtgggggctacatggatcgcgttgcttacgatagaactgcggagataatcttccctattctcattaacaagacagtagaaatctcatcctccaatctgaacaagtattacggtggaaccgggaagtatacggtcactttgacagatggcggaaaccccatcgccaacgcaaatctcaacgtctctctagctggcaagacataccctttaaagaccaacgcaaacggtcaggcaagcatggatattaaccttaccccggggacctatgaggcagtctgcacttatgacggagtttcgcaacgctcaaatatcattgttcgctcaacgatcaacctccaaaacctcactggcatttaccagaacgctaaagtgaatgccacattcttgaatgctgccggcagtcccctcgcgaacaccaaggtcagttttagagtgggttccaagacttacagtgcgacaacaaatgcaaatgggctggctacagccaatgtggatctggctgcaggcacttacgatgtgattgcaattaacccggtgaataatgagcagaagacaagcaagctcactatttccaaagctaagagctctataagtttaagctctacaagcaataacgataaggttaccctcaccgccagcttatcccccagcacggccagtggaaatgtgacattcaacttaaacaacaagaactacacggcaaagattagctctggaaaggcgagccagaccattactggactgaacgagggaaactacaccgccaatgcctattactctggggacagtaatcttaactcgtccagcgcaagcactaaagtggttgtgaaaatcgtcattccaacgaaaataatctacaaaaatatgaccactggccctgtggcaaagtcagacggcaggataggaaattatttctgtgtaaaattggtggatggcagcaataacgccctgaccggcctgcccatcaagatcggcttcaacggaaaaatctacgacagaacaaccgacagcaacggcgaagcacgactgcagattaacctggctaacgcggacatatacacctttgccatctgctaccttggagacgatgaccaccaagcatccttcgaagtggctaagattgacgtaaacaagaagtacccaaagccaaacagtgctaatggaaactccaacggtgtgcccgcccaggagacaataagcaatacaaagctgaagacctacatccaatacagcaatatgaccaccaaatccgtcctgaaatcagacggacgggtgggagactactttgaggtcaaactgctggacaataacaaaaaggcaatggcgaatgttccaatcaagatcggtttcaacgggaagatctacgaccggaccaccgactcaaacggcggtgcgaagctccagatcaacctcctgaagccaacaacatacacattcgctatcgcatacctcggcgacagcaaatatcaggcttcattcgaggtagccaagatcgtggtgaaagcccagagccctaaactgaccgctcctaaaaagacatttaaggcaaatgcgaagaccaagtcggtctcagccaccctaatctccgagagaggaaagcccatggccagtcagagcctgaagttcacaataaacggcaagacctacacagccaaaaccaattccaatggtgttgcaacagtcaatatcagcctaaacaagaaaggaacctactcctgcacagtcaagtttgccggggtgacgggagcaaatgccaagaccactaaaaccacaataaaaattagt

SEQ ID NO: 16754 - DNA, 4305 bp, synthetic construct
  source 1..4305: mol_type = other DNA
ctgtacatctcagagatagagattaatcagaacattatcttgaacacggagggcaataaaatatatctcaacaattcccctaaaagcaatatccacgataactggtttggaaacactctgctgaactatgacgaggtgccatatgaaggctgcaccaattggatcttcctaaacggagaatctaaccaggtgtcgctggagaaccccatcagctttgaaatcacatttaccctatcctctttcaataagaataccaagaaaattagcaactatgacgatcgaaagctgccattcaatctaaccgcccacgcagagcacggtatcctgaatcccaacagtaatctgctgggcaagacaacaatctatgagaccgaaatcatcaacgttgagcgtattatcgggaacattgccaatatcgattcagagtttgaaataatggagtttttagtcactgacgggaccacattctatgacctgaaccagctcatcaacaacaacagcaacaatgaaatcaatattagcggcaattacacataccatgatgatatcgactttgagtttaaggagggcatcaatgtcaaccgcagcctaatcattaatggaaacggctttaccatcaacggattaaactcctcacgcatcttcaatatcaatggagacaatgtgacaattaataatatttcccttataaacggtaatggttatgaggacacctacgactccgacggtggagccatctactggaaaggggctgacgggaccctgattcagagcaatttcacaaacaacagcgggtataatggaggcgccattctctgggaaggtgacaacggaagaatcatcaacaacaccttcaagaacaacagcgctttcgatggtggaggtgccatcaccatcaccgttgagcgaggcattattattaacaacaccttcacaaacaacagcgcatcctacgatgggggcgccatctacctcatcgcaagcagtggcgagatcataaacaacaccttcaccaacaacagcggctacaaagggggcggtatgatctgctacgctgacaatttgagcatgatcaacaatactatggagtcgaacattgcatccgacgacaatggaggcgccattctctgggaaggggaaataggccgcatcatcaacaacaccttcaaaaacaactacgcctctgaagaaggcggggctatcagcattcgcggagagatcggtgagatcatcaacaacactttcactaacaacaacgcttcctaccgggggggagccatctcgattattatcactagtggagagatcatcaacaacaccttcacaaacaactccggatacagcggcggtggtatcctgtgttacggcaacaacgtaagcatcatcaacaatacaatggagagcaacattgcatcctacgatgggggcgcactttacgtcagcatggattatgctatgattatcaacaataccataaaaaacaacaatgcctccgacaatggaggggctatctactgggatagatataagggtattatcagcctcaacacaatcgccaacaataatgccaaccacgggggcgccatctactatgagggttattcttcaaatcttaactataacatcatcttaaacaataagaatagcgagatctatttcgacaatgtccggactttcaacgggagcaataattggtttggaaacaacgctagcaactataacctgaatccaaacactagcttcgaatacgacaacagccctaatgtaaccctgagtgattggttgtttcttaatggcacggctaacccaaaaatagtgaacgcctttgagagctcccagatcttgtttaaattgtattcctatgacggtattttgattagtgaatatgacaactccctcatcaccgacaccaagctcaacctgagcgcagaaaggggacggttcgacaagacaagcgccagtttcaatgagccgataaactacacggcgattgaagggggccgagataccatccgaggagctattgataagagtgggtacagcataaatctcaccaacaggcgggtatcctcaaaaattgctatggatactaaagagataaactacagccggaatgcatcaatcaagctgaattacaatgactttgctggaggcaatgtcacaataaggctcatgggagaaaataatgaatacctctttgaaaacatgaccctgaacaagactatattcctgggagtgataaatagggacagttacaacgtccggatcgagtactccggcgataggtccttcctagaggagaacattagcgaatctctgatagtgaataaggctggcaccaagattgttcctacaaatgacacaatagacttgggcattggcgagaacagcaaggtcaactacactttctatgtgattgacgatgaaggccagtacataacgaacccagaggacattggaaacattagcttcaagtcagatgggagcgctgtcgaggtagattcaaagacaggggagatcaataccattaaggaagggactgccaacatcctcattcgtttccagggtgatgaaaaccatcttgattccaatgccagtgtatatgtaatttccagtaataagattaggaccaagatcacagcggaaaacctaacaaccgattacaaaaaggacgactacatcattgccagactgaccgacctcacagggaaaccgatcgccaatgcaaagctgattgtggagcttaatggcacaaataactatacgacgaattcaaagggcgagataaaggtccccactaaagggttggattcgaatgagtacatcgcaaagatcatctatgagggagatgaatcctaccggttttcaaacgcatccgttagacttatcgtgaacaagctcaacaccgagatcactgccaataatatcacaacaatctataatataacgaaagagctggtgattcgcctcaaggacgtcaatggggaccccgtgagcggggtggaactaactgtggacctgaacggaatgaataactacacaacagacgacaatggtcaagcaatcgtggagataaagggactgattcctaacaattacacagccaagatcacctttgaaggcaatggtaactacaacaaggcctccaccgaatcagatatagagatcttaaagattcccagcattctgaatgggacagacatgaccgtaaactataaggaagataagtatctgactgtgagcctcaaagacaaagataataagcctatccataatgccagcatcagcgtggaattagagggtattaaaaattacacgactaactctgatgggcaaattaaagtgcctaccagcagccttcctgcgaaaaaccacacagccatgattagatttgaaggcaacgaaatttacgagaagtcaaatgctacagcgaaaatcacggtgaataagatttccggcaaattgactgcctccaacgtcactgccagatacggagacaatcagaacttggttattagtctgaaagacagcaagaaaaatccactgtccggtttcaaggtgtctgtggacctgaacggcaaaaagaactacacgacagattctagcggccagatcaaagtgtcaactaaagatctcgttccagacacttataaggcaatcatagtgtttgcggggaatgagaactacactggatcaaatgccagtgcaagtgtgcgaataaatagaataaataccaccttcaaatacactaacatgaatacaattgcttttgattcaaacatagagggacgtattggcgaatatttccgcttccaattgctcgatgaagatgggaagcccctgtctggcaaacaggtgttcattggatttaatggggtcaagtacaatagaaccacaaacgagacaggagaggctaggctgcaaatcaacctgaaatatgtcaaccactatacctttgcaatcgcattcctgggcgatgattattacaagggcagctttaatgtggctctgatcaatgtgactgagcagattcccgtccttagcaccagtgctaagacatataagtcgagtgctaagaccaagactttgacggctactctgaagtcatctaggggtcatgtccttgcaggcaagaagattagttttaccctgaacggaaaggtttacactgcgaatacaaactcgaaaggtcttgcgtccgttaaggtgtctttatccaaaaaaggaacttatagttttaccgttcagttcggcggtgacagtacttacaagaaggttacgaagagttcaaaacttacaatcaaa

SEQ ID NO: 16755 - DNA, 4413 bp, synthetic construct
  source 1..4413: mol_type = other DNA
atgtccgaggatatcgggatcaacgacaataatggtgctttgattgccgacgtgaacttcgccgacgacaataacaacgcgcttaaggctgagtccaacagcgccagtcagaacgacgcttcaatagatgagtctgctaatcccactcaggatctggtagacacagataacggactgaaccagtccatcactaaaagccccctaaaatccaacacgggcctcactgttacaaaaaccatcgacaacagctctaaccacatgcctgtggacgggttttacgacattggagacactatctactataccatcaacataaccaacaatctcgaggagagcataggcaatatcagtgttgttgagaacttccctgatggattgatatgggaatatatttggttcgcggatgacaaccccaactggaagaatgagagcaatgtcttcaactacacaaaagcactggagcctgaacacagcatcctgctcaagatccgtatgaccggaaacaaaacaggcacgtacattaacaccatcaacgtaagctccaacctaacaagctctcaggagttcttatccgaagaggtgaccgtttatgctcccaatttaacaatcacaaaagtggccaatgatcccatcgtgaccatcggagagatagcaaactttacaatcaacgttaccaataacggaaataggccactgagtaacttgcggatctacgaggatcctgaggaatcactgttcctcaatgagttcactaacattagtgggaactgggactcttttgcaaaccggggtggagattacggttttagcttggaccagctggacattggtgaatctgctgctatcatagtatcttttctgacaacagaaattggcaatttcaccaacaatgtctatagcaactatccgaatcctcaggtggaggccaatgccacggtcacagtggtgcccagaattgaaaagactgtcaatgccactgaaattgacatgggggagtcggttgaatacaacgtttacatcgacatgacaggagccaacaagctgggcattgacgactttaaaatcaaggtcaccgacattctgaacgaatacttcgacttggacaaggatagcatctcctcaaattggaagtataatcgcgatgaaaaggcctttgaatatatgctaagcgacattcccgagtcatttgagttcaactttgcggtatatatcacggagcgcggcaattacaccaacacagtttccctgaaaataggtgacctgcctgaagtctccgcggagtcggatgtcactcatgtccgaattagtgacgcaaatatcgccgaaactgccctcgactcaacagtgaatcttcaagagcaagcggtgttcattgtgaacatcaccaatacgggagacaagacatttaatccttatgaacttgtggtaaacgacgactacgacgaggatgctctcacgtacctcagtcatgaggatatcacaggcaaatggatcgagaatatcgaaacggattccctttcatttacattgaattcaacactcgaggtgggggagtctgccagctttaagctttacttcaacacaagcaaggtcgggtcttattccaactatgtctatattaacatcaacgacaaagaggatgactcaatagtcattgtgctggctctcatgaacaagtcagtcaatagcagagagattgacgccggagactctgtggagtataatatcttcattaatctgagcgggtatcaaggccctgtgaaggtggaagacctgttcaatgatacctttgcattggataaggacacgatctcagagaactggcactacgatgaaaccgaaaatgccttcattttcgatcttagcgacaatccagacaccctgaacctgagcttcaatgtgaccatcaatgaaaagggcaattacactaacctggccaagctgatactgagttcagattatcctgagatcaccgctgaagctccagaggtctgtgtctacaagccggatatgacagtgaccaaaaccgtgaacgacactgaaatctacatcggtgataccgtgaaatacactgtcaccatagataacactggagaccgcactcttacaaacattatcgtcaaggacgagctggaccctgcctttatactggatgaatcctctatcaccgagggctggacttacaacaaggacaactcgtcattcacctacaacaataacataagcgtgggtgaaagcgccatcctggaatttattgttgagataagcaaagaaggcaaatacacaaatatcgtaaacgtcagcagtcccggggtggctaataaagaagctaggtcggaggagaccgttgctaaaactattccgaccaacatctgcctggagaacgtgactgccgatccagacagttttgtgagaatcatcatcaacataacggcagacaagggcctgattaacgggaccgtaaacatcactttccctgacgggacaaatgaagccgtagagatcacaaacgggattggggagaccgtctggtacgtgcctgacaactacgcttctggaaactactccgtctttgcatattacgagggcaacggcacctaccttgagtctgaaggccaaggcaatattgaggttatcccctactacactgaaattagcctatcgaacgtgacggcctacccagacagtgatgtggaaattgagatcaacattacggcaggggatgctaagcttatcaacggcactgtgaccgtgtccttccccgacggcacaaacaaaacggcagaaatcatcaatggtaccggaaatgttaattggaccgtaccagacgattataagggcaattattccataagcgcaagttatcctgggggtgggaactatctggattcaaatgccacagccaatattgaagtcatagcaaagatcagtacccagatcacagccgacattcctaatgcctatccgggcgaggagatcgatatttctgtcaatgtcaccgcagataacgatgtgccattcaacggaaatattacagtgaatctacctgacggcagcaaggaaactgtagagattaaagacggcaaaggcaacatagcctggaccgttcccgacaatttggatgtaggagattacaatctcaccctcactttcgatggagacaacaactacctgcctagcaatgcaaccagcaccctcacagtggagaagatcaagttactcatcatcatagataacatcactgcccacccaaaggaggacgtgaccatttctgttaacgttgctattgatgatggttctgagtctgataactcaactaaaggttcgttatctgataacaacctcaataagggtgctctgtctgataacaatctaaataagggtgtgctgtccaacaacgataataaggctttactgaaggcgtatatcagttctgccaaaggcattctctccagcaaccatcttaatgacggagataatttcaacggctatgtcaacatcaccctgcccgacaactccaccgttgaggtgcaggtcaaggatggcaaagctgctctcaattggactgtcccagaggggtacgaaggtgagtacccaattaaagtcactttcaacggcaacggaaagtatctatctgccagcgagacaggatacattacaatcgaaaagatcccaacctcaatcgaccttgagaacattgggacaaagccaaaccgggagatcataattcccatcacaataaaaacggatgacgacgtgccattcaatggcaaagtgagtgtggaactgcctgatggcacaattcagaccgcagaaatcacagagggcatcggaaacacaacctggactgtgcccgatgactacaatggggagtataattatacagtgaggtttgaaggggacgaaacctacctcccctccaacaacactgcgatcattaaggtggattccaagatcccagtggaaataattgtgggaaacatcaccgcaaaaccaaaggacaaggtgacaattcctatcgaagtaatcactgcagaggagtccctgtttaatggaaatgtgacggtacggttgcccgacggaaccgaggtcactgcccagatcactaatggtgaaggctccgtggaatggacagtccccgaggactataacggaacttactccgttagcgtgaggttcgacggggatgatacattcctcgaggctgatgggactgggtttatcaccgttactccagagacgccggataatcccgtgcctccaattagtcccgtttcccccgacaacccagtggcaccagcaaagcactccgccaataagccgatgccaatggataaaaccgctccgggtaatcctattatggcattgttaatagtgctgtcaagtttgatttttgtgcgacgaagtagaaag

SEQ ID NO: 16756 - DNA, 4917 bp, synthetic construct
  source 1..4917: mol_type = other DNA
gaaaacatcaatgaatccgaagttgtgggcaacgctgagatcgaaaacaacctcagcagtacaaacgacaatttcgaggtgtccaaggatatagggtacaacgtcagcaagaagatctccacggacaatagcaatgaaaaccttcggaactctcaacacatgaccctgttcataatcagtgataatcccggcaccaatattctggacaaagctattttggagctttccaatgagaataagatcaacggtgtcaacttaattatccgcaatggaaatcaggtaaagagcatgaatgaaaacgagctaagctatctgttgtctgattgtgatgctttcataggggaatggatctccagtgatgtcgactctgtactgacaagtgtgctcgtcaaaaatcctgatctgtctaacaagaagctgtttctagtcttggaacctccttccggcaacctaaactccggatccagctcactgaaccttattaggaataacaccttgaactataataaaattttcacgaactactcgaatgaggagctgattagttatttcaaaaacacgaaaaggggcaactcatattctatcattaataactacctaacaaatggtaacggcaagaatttcgattcaatttttaaccgactcgttctctataaggatctgaacgacaaaaacaatttgaagaaccagatcctgtttatcctcaattatctcggcgtggatgtgtcctacgaacagccaacattcaccggtgttaaaaactatggtatctacagggaccggtggtactccctggatgagtatatttctaccttctttaaggcaactaataataggacggtggggatcctggagagtaagatgtatattgaatctcagcagctgaacacctgctactcaattatcaacagcttggaatcacgcaattacaacgtaatacctgtctttgccgacggcggatccgctgaacaactgaaggtcatggtggaatcctggacaagtgcgggagacgatatttccggatttctgtctaactcttccaactttgacgtgtatattgatgcgatcgtatcgatggtggcatacggggtgggcggggagaacttcaccaaagccacctctttctttgaggaagctggtgtgcaggtctttagggcggttcactcggatcacgtcagcaacgaacagtgggaactggggtccactggtttaacgacagagaagagtgataaatggtggcacattactatcgccgaagcgcaaggcattattgatgccacattcatcggagggaattcaagttatatctccaatttgaccggagcccaaatcaccacctatattccccacgaagggaacattgggctgctggctgacagaatcgattcttgggtggacctcaagtacaccctcaatgaggacaaactgataagcataatttattacaactatccacctggcaagcagaacatcggttccagttacttagatacaatcaagagcatctacaacatactctatactctcaaagctgccggatacactgtgggaagtctgccagtggacgttagtgagcttgaggatctaatgcttacatgcgggatcaatgtagcgacctgggcccccggagagcttgagaagatagccaacagatcttgcatcacgctccttcccgtaagtgaatacaactcctggtttaacagcctggatgagatcgtccggatacaggtctctaacgggactgttgcctatattggggagctgactaagagagccgtggagctggactataccaaaacaattggcagcacaattgacgactggtataatcaggttgtgtccttgctgccagacgaaaagtcagtggaagccaaggaagtgttgagtaatatcgtcagggctctcaaagattatgctaatacccattcccaagactattaccggctttacctgaagtactttgacgagtttaaggagctgaacatccagggactgaatggatggggtgaaaccccaggcaatgtcatggtagtgaacaaaaatggtaccgattacttcgtcattcccggcttgacatttggaaatatattcgtggccccagagcctcagagaggatgggagtctgacatcaaaaacctctaccattgcactgctgttgcccccacacatcaatacctggcggcatattattacatgcaaactagaaacccaaatgcgatggtcttcaccggcagacacgcaacccacgagtggctgcccggtaaagagattctcttgtccgccactgactacggatcagttgttgttggcgatgtgcctcagctgtacttctatattagcgatggcctcggcgaggctatccaagctaagagaagaggattcgccgtgattatctctcacctcaccagcccaatgtcttatgcacatctgtatggtaacctgactagcctggctaacttgataaacgactatcaaaaggtagggagcaactccgagaaaaataaaatcggagagaagatacaggacttgataattagcaatgattactcaaccaatctcggactcaacaagtcccagataaagagcatttccatcgattccttgatcgagaagattaatatcttcctcaagagcacccaggatactctgcatcccctgggcctgcacgcattaggagagtactggagtgaggaggacatcgccagtacagtgtctgccatgctctctcatgatttcgtgctagagaataatcagggcactcttaacctttttacagaactgagcaattactactattcaaaatcatatggtgatcttactccattcgagcgggagtttgtattgaacaagtcgtacgatatatgcaaggcacttatttactgggacgttaatacgataaatgaggtattaattaacgacaacgttaagttcaacaattctaacttctacgcctgtcttaacctggccaaacgctacatcaacctaatcaatcagagtattagcaacgagctcaacgccatgcttgacgggctgaacggccgatacatccctaccggagagggtggggaaatcgtggttaagccaagtatcttacccaccggcacaaacattttccaggaccagtcgtctgagctaccgacacaggatgcatggaactacgccaaaattcttgccctgctgaccctcgccgacctgaatgacactactgaaaagatcatcatggggatctggtgtgtggagacagcacgagacgatggggctttggtgtcaaccgtcctgtatctgttgggcatgaagcctgtctggacaaattcgagcagcgccggctttgacgatgaaggcaatcctactggcaaaaaggttggtgcaatgcctgaagtcattaaactaaatgatctcactcgtcctgagggttggaataagaaaagaatcgatgtgaccatcattacgagcggcctcttccgagatctctactctagccagtctgtgttaatggataacgcttttcgagtagcactggcaaggagctatctgacactgattaataataaaactctgatgaacggaaaatacggcaaggagctccgccaggctctggactgtgtcatggagggcataaactactatagggcttctaatgaagctttaaaggacaactacgtggctcagcactggatcaaagactgcctatattacctgagtatcggatacaacgcatcgtacgcaggggagtgcgcaatcacccggatcttcgcaccacccaacggagattatggtgccggcatatcaaagcttgtgtcaatgagctggacttggaacaacacagacgagctcgctcagttttacctcgggcgcatgggaaatatgtacagcaagaactactggggagacacaaatccacttgtctttctaaaagcattaagcaactcagacacaatcatcacaagccgcaacaccaaccagtacggggtcttggacaacgatgacttctttgactactggggggggctgtcaatggccgtggaacacgtctcaggtaaatctccgaagatgaacgtgcttatgtacgccgataaggacaacgcatatatttcctcacttgaagaggtgatgtaccgtgaaattgcttcccggtacgacaatcccgactggatcaaaggcatgatgaaggaggggtacgggggagctcgttatatgtcaaataaattcgtgagcaacctgctgggttggcaggtgacacgcccggacagcgttagcgacgacctttggaatagggtgtataatacctattataaggacaagtacaatctgggggtgaaggattggctcatgagcggaaataacgcctactccctgatctccatgtccggaacgatgctgagctcaatccataagggctattggaatgctgatgacgccacaatacgggatatcgccaatacttgggtgcaggccacagtgaagaacggggtggcctgttgtgactgcagctgtggcaacgtggctatgatgcagtgggctgttcagtacgtcaacccggacatcctggcccaattattgccgaaactgtatgacgcaactgaaaaccccgtcttcctaaacaacacccataatccaaacacaaaacccgaaaacaataatgatccccaggtagaaccttcaaccccaaatcctaccgatggttcttctagctcctcgactatctctaacaatgccacgtccacaaactctaatcagcacagcctcagcaatagtcaaaactcccaaggaaacgcggtgagcgacgtgggcgacagtagttcctccgattcaggcacttttagctctgagggcgctgacgtcaagaaggcaatcgagattaaccccatcacccagcagtctgccagtgaggtgggcatgagtctgctggcagtgctc

SEQ ID NO: 16757 - DNA, 4977 bp, synthetic construct
  source 1..4977: mol_type = other DNA
gcgtcaagtgatctgagttccagtcctgccgataatgaaaacctcgaaattgatagttttgactcaaacgaggatttaaccgtgaacacgaataccaactatatcgaaagcggaaataacttggaaatcgattataaatctaattctaaagaatctgtgaatgccacaaatgatatcaaagaggagactgtggattacaatgaagatattagcgtggagaagaataacctaaagtcctctaaactgagtagcgtttataaaataacagagtctaactactctaactactttaacaaaagtggaaacatcctatcgaacgtgaaccctggagacacactggatttttcagggtcattcaacaacaaggactttaaaatagatatccccttgactgtaaccagcagtgacggtgctcagttcattgactgcagcttcaagttcaataagggctctgacggctctaacatatccaatctcaacattaactcttctcgcctgcaaagtccgcttatctacttggattccgtcagcaatatgaatgtgttcaacaacaacctattttcctgcgcttcaaagtcctatgcgctctgttttagcaatgtaagctattcctctgcataccacaacaccctgcagacgacagcattcgttgtaggctggggccatccctctgcctttgtcctggctggggcaaacaacctgaatatctcctcaaacaatgtgatcgtcaacgattccaacggcatctatttcactacatatgtgggagacaccattagcgcgaacttaatcaatgaaaataactatatctttaacaataccgtgcacagtgtccgaggtgttgaatgggctgtggatgaaaacggcaccacccccctcccatcctctttctgttatgcgattcaggtgatgggaagcggtaataaattactgaacaatacggtctacaacgcgtataggggcattagtgcttccggatccaacagtgtcgttgccgggaatgtggtgtacgatatcaaggggaattactatagcggaaatacaaaggacgacggcggggactacggcatcaacgtggggcccaactccatagtggaaaacaacacaatttataattcccactttaataaaaactctggggtggccatctcggtgggttcaaataccaccgtgaggtataacaacatcacaaacatcaacgggacaggggcggacctctccaaaaacttcatagaatttagccacaatcgcattgataatgtgtcagacaatggaatccgagtgaaaggccagtacgggaataccaatatttccgataacttcattaattcaacagacagttcaatcactttactgaggagctcaaaggacaaatacccgtccagaatcaacattgaaaacaatgatttctacacagatgtctctcctatctactatctggaggggtacattggcaagctgaccgccaaggacaacacgctcaacggttcgtccatctcagatatcagtatcgacgtgcctagctcgagcgagactaaggtgtctatcaactcaactaaaatcgatttcaatgaatccgttctaattatgccaacggtcagcgcctacggtctttccctcgagggcctcgtcgatatcattgtcaatagccaaaagatcgcaactgttcctatcgggtctaactacacgttcactccaaccgaagccggcagtttcagcatcaacgccaatttcaccggtaatgaagagtataagcccagcgagtctgctgttctgatcctgactgtgactcctaaggaaacaaccacttccattatcatcagcccaagcactgttgagctgaacgacacggttgtcatcagtcctttcgttcgctacaatggaactcttctggaaggttttgttgacattctgctcgatggggagaagctggatactgtagagataggctctgattatagttatgtgcccaatagttccggcagtttctacatcagcgctagcttttctggcggaaatggttatggggcttctgtgtcggacatgctcatcctcaccgtaaatgagtccagctcaattgaggacccggacgaccccacgaacttgacagtctcttccatcctcatcagccctaacaccgtggaggtgaacgatacagtgctgataagtcctttcgtgcgatgcaacgggacgctgctggagggtcttgtggatatcttgatcgacggtgagaagctggactctgtcgtgatcggctctgattatgcttacgtgccctcgacggccggcacttttaacattagcgcaagttatgccgggggaaatggctacgagccctctgtctcggacatcgtggtgcttactgtcaatgagaagcaaattattgacaacggtaccgataacaatggtacagacaacaacggtactgacacaaacggaacaggcactaatggaactgatactaatggtaccgacaataatggtactgatacaaacggaacagatacgaacggcaccgagaataatggaacagatacagaccagattaagatcatcataaatgatgacaactactctgactactttgataacggctacccaattgacttagacgtggacggcaactatacgctaattatcgacagtctgaacaacaaggacataataattccatcaggatttaatattaacatcataggaaaggaaggctctggcacaataaacaacggtacaatccaactgggggacggcacagacgaggtcggggatgtaaagatctccaatctgacctttaacaactataataaggatgctattgtcattaacgagatcgcctatgatctaactgtggaaaacaataagatcataatcaatacagaagccagtcctggaaacctatactttagcgtttatggaatcaatgcaaagggctacgttgattcactcgctgtgagagacaacgatattttcctaaacggttctgcgccttacctctatggggtgagtttggggggctacggggccatcgccaacccgcagaatattttcgttcagaacaacaccattaatatcaacagcacggctagtatgggcatggccgagggcatttacctggacaaccctataaatgcagccgttctggacaataaaattaacatagaatctatcaatgatgtctatgtgtacggcatgcagattgcagactctgccttcagcgccataggggagggaaagaccggtgtcaaatccccatacgacattatgattgaatcaaatgacttgaatttgaaaagcaaatacatggtgtatgggataaccatccttgattacggctgtgacggcagcttgaatgaactgggtcagccaatgaccaatatgatggacctggacactacaatccaaaacaacaatctcgttgccgactccgagaaggcagtgatgggaatcgttggaaagacctacaatatgtccgtgttatgtaacaatctgtccgtaatcggcggatccattgagggagttgcctcccatgacgcactcggagtggacaattatgctctgggagtccagtactctggaaaggattacactgtgttggtcaaggacaatacagttagcaccaatgtgctcgctgagtatctgaacaacaaagactatgaagcctacgtgtcattcgtgaacaacacaatttaccatatcgacggcccatccagtggaaatgatactcccgagaatggcactggtgataatggcaccaacaccaacggcacagatattaacgggacagacactaacggaaccgacaacaacggcaccaataatgggactaatggcacgaacggtacagacaccaacaatacagacaatataaccaaacggaccgtgaaagacctccaggaattgattgacaacgcaactagtgggtctgtggtggatctcggcaactttgagtatcttgacgtgtctaacattgacattagcaaggatatctctattgtgggaaacaatacagtcatcagaactgcaggtgacggcaagccagtcttcaacattaaggagggcctttcctcagtgtccattagcggaatcgagttcatggcaaataatggggacgtactcatcagagccaaagcagtcaattcaaccagccggctggctatagaaacccccgagattaacataattaataatactgtaatcaagtccgatgatggggtggtagccgagtccgtcaccgtgctggagctggactcgtcgcggtgcatccttgctcccacaaatgacatcaaggtctccaacaacacactggagattggaatgaacccatttaactttgttgtggagagcgtcatcaacgctgctgatgttaatgtgccagtcgggggagacctgcagagcaaagtcaaatccgtaatccactacgaggatatggataccgtggccgtggccaaggctgacggcagggtaggaaaatacttcgaggttaacctgactgacagtgatggaaaccccctgtctggcaaattcgtccagatcgggttcaacggggctgtctacaatcgtaccaccaacgaaaccggtggtgtacggttgcagataaacttaggatacaagggaacctatacatttgcaataagctatcttggggatgagaactacaacggcagctttgtcgtggctaaaatcaaggtaagcacccagaacacaaagatcaccagctcatcaaagacttacaaggccagcgccaagaccaagacccttactgccacactgaagtcctcagtgaacggcaatcttatcagcgggaagaagctgactttcacagtgaatggcaaatcatacacagcaaccaccaactcaaagggggtcgctagcgtaaaggtcagcctttcaagcaagaaaacctacagcttcaccgtaaaatatgcaggagatgatacatactcctcttccagtgcaagcggtaaattgacgataaaa

SEQ ID NO: 16758 - DNA, 4605 bp, synthetic construct
  source 1..4605: mol_type = other DNA
ttaaacaatcatcctgaactgtcaaacaaaaaactgttcctgatccttgagccacccacgggaaacatcaattcgagctccagttcattgaacttagtgcgcaactctacaattgactataagaagattttcaatggaatttccaatgacgacctgatcaattacttcaaggctaccaaaagaggaaacaacttcgagagcattcaagagtacattgacaatgaaggcagctcttttaatagcatctttaataatctggttctctacaaagatataaacgataaggcaaacctgaaaaacgaactgctctatatcctttacctcttgggacatggatgctcctatgagtctgcaaactttacaggcgtacaggcatctggcatctttcgggacaggtggtatagctttgatgaatacgttctcaccttcttcaatgagtcccgaaatcggaccatagggattttggaaagtacaatgtacatccagtcccaacaattggacctggtgaatgaaatcacagagcgccttgaatcaaaaggttataacgtcattcccatttactgtccggccggtaacgccgaacagctcaatatcatggtgaaatattggaccagtgcctgctccaacatcagcggcttcctggagaatccacaggactttgacatttatgtggacggcattatttccatggtggcctacggggtcgggggcgagaacttcaccaatgccaccaaattctttgaagacgctaatgtgcccatattcagagcggtgcactctgaatacatcaccaacgagcagtgggagttaagccctgtggggctctctaccactaaaagtgacaaatggtggcacgttacaattgccgagtcccagggaatttttgatgctacctatgtgggtggggttgactcttatatttcaaataggaccggcgcaatcatattgacttttgtgccagtgcacgagaatatagagctcctgacggatagggtggacgcctgggtggacttgaagtacactccaaatgaggataagaacatttccatcgtatactacaactacccccccgggaagcagaacatcggtgccagctacctggatgctatcacaagtgtctacaatatgctgtataccctgaaggatgagggatactacctgaccgaccttccaaacaacgtgagtgaactcgaagatatgatgatcgcctgcgggataaacgtggctaactgggcgcccggagaagtcgaaaagctggccaaccggtcgggggtcgctctgctgcctgtagacgagtacttggagtggtttgattccttagacgatattgttaaagtccagattaccgaaggtccggttgcctatattggccagatggttaggcgtgcggtgctcatcaactacaccgacgaggtggagacaatggtcaatgactggtacaatcaaatcaaggcattgctgcccgaaaatcagactgtggccgccaccaatatattggataagcttgtaaacagcctgaagctctatgcaaacgcctcttccgatggcgatgagaatgcctccctgtactacgatgaattcctgagatattacgacgagtttaaaagtttgaatgtttctggcttaaacggctggggggaagcgcctggaaacatcatgctggtgaaccggaatggaaccgactactttgtgatcccaggtcttacattcggtaatgtcttcatcggccccgagcctcaaagagggtgggaggctgacattgaaaacctgtaccactgtacagctgtagcgccgactcaccagtatttggctgcttactattacatgcagaccaggcagagtaatgccatggtgtttgtcggcaggcacgcaacccacgaatggttgccaggcaaggaagttttactatcatacaatgactacggttctattgtggtcggcaaagttccccaggtctacttctatattacggatggtctggcagaggctatccaagctaaaagacgaggctttgccgtgctgatttcccaccttgattctcctaaatcatatactcacctctacgggaatctaactgtgcttgcaacgctactggaggagtatgacaataatcatatcatcatagagtctgattctgacaaagataatcaggctatcacttatcaggtaatcaaggataaccagactatcacttatcaagtaatcaaccaggagctggaggacaatctcacaagagcaatcaaggacttggtcatcgcaaacaactactacctgacaatcggattcacggcagaggaactgaacaatactgacatgttctccctaagcagcacgctgaatgctttcctgaagaacactcaaaataccctctatccactgggactgcacgccataggtcagaaatggaccgatgaggatctggcgaacaccgtggcaatcatagtctctcatgactttgaatatggcggcaagaagaccaacctcttcgatcagctctccctttattactacggggaaaaatattccaacctgacgccattgaagcgggattatatcctcaacaggtcagtggatgtctgtaaggctctgatctattgggacacagagaccgtgtctgatacaattgggataggtagtccagagttcattgagagcttaaacattgccaaaaaatacatcgacctttacaatcagtgcatcagccttgagctggaagagatggtttccgccctgaatggaggatacgtgccagtcaatatcggcggggaaagtgtgactgtccctcaggtgctccctaccggcgcaaacatgtaccaagaccagtcatctgagcttccgacgcagaaggcttgggattatgccaagacactctcacttctaaccctggccgacctgaacgacacgacggaaaagataatcatggggatctggtgtgtagagactgcacgagatgacggtgccctagtctctacagtgctctacctgctgggcatggagcccgtctggcataacagctcaagtgctggatttgacgaggagggcattcctaccgggaagaaagttgaggaccttcccaatgtcatagctcttgaaaacctcacccgtcctgacggttgggccaaaaagcgtatcgacgttactgtgatcaccagcggactgttccgggacctatacagttcgcaggctcgcctgatggacaacgcctacaggatggctttagcttgttcctattacactatcgtaaacaacaagacaattatggatagcgagtatgggccccaggtctatgacgcactgcgctccatcatgagaagcattagcttcaagggtatgtcaaacgaaagcctggaagacaattacgtcgctaagcattggctagaggactgcatctattacctcagcctaggctataactctacagtctctggcgaatatgcgataacccgcatctttgcaccccctaacggggattacggggctggcatttccaagcttgtgtcgatgtcatggacctggaacgacacagatgagctgagcgagttctatatcggccggatgggcaacatgtatagtaaatattactggggagatacaaaccctgtcgtgttcatgcgagcgctatccgatacagaccatattgtggtgagccggaataccaaccaatacggtgtactcgataacgatgacttctttgactactggggagggctcagcatgaccgttgaatacctctccaacaagactcccacaatgaacgtactgatgtatgccaataaggacaatgcctatgtggccacattcgagaatgttttctataacgagcttaacacaaggtacctaaaccccgaatggatcaagggaatgatgcaggaaggctacagcgggtccagatacatgtccaacaagtttatttccaacctctggggatggcaggtaaccagaccttcatctgtctctgaaacggtttgggatgacgtgtacaacacctactataaggacaaatacggactgggcgtgaaatcatggctccaatctggaaacaatgcatattcactgatatccatgagcgggacaatgctgaattccgcctactcaggatattgggatgccgatgatgctacattaagtgatatagctaacacttgggcacaggccaccgttgcaaatggggtggcctgctgtgactgcagctgcggcaatgtggccatgatgcaatgggcattcaagtatgtgaatgctgacttgctggctaagttgatgcctaagttgtatgacgccactcagaatccgctcttttacacaaatagcagtgatatgcctacaaactcttcgaatatcgaccgccgaaccacaaacagcagtgcagagtcgaacaatactgaaactgtgcagactaactcaagctctaacagtcagcagagcgccaacggtaacactaacattccaggagcaagcggcggctacatggtgggtacagaggcggatgcccagtccgatatggccagtgattcagatgctggaatgaacgatgccaatggagagggccgctctgtggaggtcactaagagcacaagcactccagtggctccaaaggacgtgagtatg

SEQ ID NO: 16759 - DNA, 3906 bp, synthetic construct
  source 1..3906: mol_type = other DNA
ggcatcagaggcccaaggatctatatcgaccagtactatggggaaatctccaatagcggcaatgtttataccgatgaatacgaagaaaaggggctgttttcagattatggaatggggatttcgttcgagagcaacgaggggttggtcccactgattcactactaccctagcaacgagtcattgccctcattctacgacccccgaggtggtggagattcagaagacgactacgaggacgaggatgatgatagcgatatagcggtgaaagaccaaggcattggaggcaactgttgggcattcagtggaattgccacccttgaggcctgcctggaaaaggtaaccggagaggaattcggctttagcgagggcaacgctaaaaacctgatggccattagctccatttacggcctgaacatagacacaaacaacggaggatacgacacaatgttcctcgcctacctcgcaagctggctaggtcctatctacgaggaatacgatacatacaatccactgtcctccctatccattgaccttccttcagtcttccacatccttgacatcgatttcttggctcctcgtaaaaacagcctcgacaacgacgagtacaaacgcgcgattatgaacaacggagccgtgagcgtgaccttcgattgggtggagaataaagtgtccaacggattccattcagtgtccattatcgggtgggacgacgattatgatgacattgactccttaggaaactacgcaaagggcgcctggatctttaaaaacagctgggggtatgaatggggagacggcggtttcgggtacctttcctacaaacagaagctgtcagaggagatcgctccttatatgcacgcctatacattttcatttaaggaaaatgacatcgggtatacggacatataccaatatgacttttcaggattaagcgatttcctgattctcaattccacaaatgcctattacaagaacaagttcattgcagaggacaacgaattcctctacgccttctccacatattttgataaggagaccgatttcacctacagcgtgtccatcaacggcaacgtcattacaaaaacagaggatggcaaagacattctgacttctatccaccactctccggctggatatcataccattcccttaggctataacctgaccttgaaagagggggatgagtttgagatcatcattaaactgctgaatgacaaccagaacaggattccggtgtgccaagctgatgagctctacagaacgagtctgcccagcaacgcatctttcatgagtctcaacggcaaggattggattgacctcagcaatttagcttcatccaatgagttctcttcacttggcatcaaggccaacactagccaggtcgcttgcataaaggccttcacttccaattggagaatgaactcggattcctctatcgtgaacagcaagaaccacagcattatcacctcagaaggaacagagctgagccaatatgaaatatgccagcttaaagtcggctcatttacaagggcttcagccaatgagaccatcatcatcgccatgagcattcccgaatggcgaaattaccaggatgagtatgaaaattatatagaggtgcatatcaacgacgaattctactatgtccgggtcaatgagggggtggcctatctggacatcagctttgacaaaattggccactatgactttaaggcccagttcaagtccaacatctactcatctgacatcgtagagtttgactttgaagtcgtcaaggatagcatctttgatgtggacgatctggacgccagcaacccagggaccttcaaggaactgcaggatataattagaaatgctaagaacggttccataatcagtttggataaggattatgctttctctagtggtgatgagtctgttgtcgacgactatatcgagataaataaatctctaattatcgacggaaaaggccatatcattgatgggagctctgactcaggcatttttcggctaagtagtggtgataatcttactctgagaaacattaagtttatgaatgccgacaacggtgcaatagtgtctaacggaaacttgacagtttcgaattgttacttcattagtaattgtgcttctggttccagttctacatctacttccagttcggattctagttccactgcttgcgggggtgcaatctactgtgagggcacctgtttcatagtgaatagcctctttgaatcgaatagcgcagatgccggtggtgcggtctactgcgaaggcacttgttttatagtgaattcctattttgattccaactacgcagatcttgggggtgctgtgtgttgtgatggcagctgttacatcgtgaattcgctatttgattccaattttgccgtttatggaggtgcagcttccatcgtggggaacgagtcctgcgaaattatagacagcaactttatcgagaatgaggccatctatggcggtgccatctacttagaaagctattgctatctgctggactcaagtttcaattacaattacgcaaacaatggaggcgccatttattctatcgcggaccttgacattcataccactggcttcaactacaatgaagcctacaaggatggaggcgcaatctacctggtaaacagcacatcctacatcaatgaaggaaacttcacggaaaacagtgctaaagagaggggcggggccatctgcgcactcgagttctccaatctaaccattcgatgggcttacttcatggacaactctgcttccaagtatggaagtgccatctttagcgtcaatgccctgaacattacagattctgaagtgactgtaagttctgggaaggtggaacttatctgctttgcttacgactatgcgtcaaatggccaggcatacggggatctgtacttcgacgaaaacagcttttatatcagtggtgcgcccgagatttactacttccgcgaaaagatagctcacaaactagccctggacctcgagttcaataacatcgagttgatccgcggagggggcgttgagatatcccgcgacttgaatgatgacggctgggaggacaaaatcaacaacaacatgctggagatttgccggttggtggatgacgatgactacatgactgtcctgcggatgaaggagatcgaagtgatcctaataaacaagaacaaccggtctgacatccagaagtttaagatcccatttaatgtcaagcttaatggctacttcctcaacactagctcactgaaatatgggagctacatcctcactggaaacctctctaaggatctggcaagcaactgtattgtaaagaatggaaccttgaaagtgctgcgtaaaaccaccctcagcagcctgtccacgttcactaaagtttatggaaacagtaagaatcttgtagttaccctcaaggacagtagtgggaaagcgatagtgggggttaacatcgctgttaaactgaatggaaaaacaattaaagcaaagacgaatagtaagggtcagatctccatagccatcagtctgaagccaaagacatacaccgcatacatcagctttgccggcaatgactattatgcaagcgccagcaagaaggtcaaggtagtggttaaaaaggcaaaccctaaactcactgcctcgaaaaagaccttcaagctcaggaatgctaaaaagtacacagtcaccttgaagaacaacctgggaaaagcactgaagaacgctaaggtcactattaaggtggctgggaagacatacaccgctaagacgaacgccaaaggtcaggtaacattcaatttgaaactggctaaaatcggcaagttcaaggccgtggtgagctttgccgggaataagctctataatggcctgaagaaggcggtggttttaacggtgaaaaag

SEQ ID NO: 16760 - DNA, 4068 bp, synthetic construct
  source 1..4068: mol_type = other DNA
accatatacgaattcacaagcatttatgagtacgcctctttaaacgacacttacattgacggcatagtttccaccaaaatcccttacgccttggaaaacatcgagctttatgtgtccgatggcagtggcgatgacgaaaatggtaacggcagcatctcgaatccatttaaatcaatttccaaggcgttgagcgagggatatcaaaaaagcacaaacatcaccgtgcacattctggagggcacgtatacaggtagtctcaactctaatctgcgcattcccacaacggtgaacattctgcttatcggcgagggggctgccaagaccattataagtgacagctcctcggactatttcattacagcattaaaagggaaatgcgagttacgaatttcccagatgacgctgaatagggcggcccgtgacacacagtcagccatctacattgaagaggaatccaacgtggccatcgacaatgtcacattcattggcgggcaagggaactacggcggagccatcaacactgctggaaacctttccattagaaattcatacttccatgacaatggatatgcagatcgaactctgcgggctaatgcctattacgggggagccatctgtaatgacggcaccctaatcattgacaatacaatttttgagagcgaccatgccggccggctcagtgaaattgcgaatcagggcacactctacatgaacaactcaaaggtgattgacagcatcaacgcgtatagcatcaacatggatctggtggctatcggcgcttatggtggccagaagggcgaaatcacaatagaaaacagccaattcatagttagctccaagaccatcaatgagttgaatgaccgcatctatgatcctacaagggcgctcacctgtctgggcatcggttcctgccaacacgcaatcctcatcaactccacattcatcggcgagggggcagtgttctccccttatgtatttgggggaattaacagcaataatctggcaagtggtgggtgtaccatgattcccggggacctcgaggtctacaactcaacatttagaaacgtccaggctgtgaatattatatattcaaggacagataacgtgcggtatcactcccagagggtctttgaaggatgcctattcgacaacgtggaatatatcatagctgtgctgaatacgggcaacttttcagtggagatgcacgactgtgtaatcctgtcagatgaccttgctaagataggatttggtagtgaaaaaaccatgaaaatggacatttccaataactggtggtcctccaacgatggatcctatgacaatgccaccctagggaccaccaattacatttcaaattgtgttgtaaagctcaaggaaataagttcagagactgttcaccctgaaagctatctgatcctcacgctcaattcgagcaaccgaaccggtctgctccaggatgcaatcctggccttcaaggcatacgacggcgaaaacatcagcgattacgatggagctctgtaccctcgaaatttcgaaatgtctgccataaacgccactctcgacgacctggaggggaccataattaacaaggccatcaatccatttgagggtgtagaaaacagcggatactacatcgaagccattgtagacaatcagaaggtcaatctgacagtgcatgacagcctctctatcggcaacgcatacattctggctgagaacatttcaatcaactacaacgaaacacagataaacgtcactgtgttggaagagaacggcaagagagcggatggggggaacgtgtcattgaaactgcacgacaaaacctatatctccgagatcattaacggcactgccatattcgatatcgacgtccttcctaaaggggattacctactgaactattcactgaatcgtccaaaggtttatcactctatttccaactcatccaacctcactgtcatcccatttaagatcaatgcttacgccaatgccagcaacatcaaagtgggtgaggatgctatcgtcattgcctacctagataaggatgccggaggcaacgtgactctgggtgaggagatccaaaaagtcaatgatggaacggccactttcatcatctccaatttagccaaaggggattacacttaccagctaagttattccggagatgaaaagtacgataatgagacattccatgtgtcattctctgtgaacttgaaggatgctagcatcagcgttgagaatgacactctggacttgtttgttggctccaatgaaaccatcgttgccactatctctccaatcgggcttgccgtgaactacagttgctctaatgaatctgtagcaatggttgatgaaaatggtgtcgtcagtgcagttggtgcgggaatggctgtgattaccctgactgtgggtgacgacgtaacttatagcaaaaactctagctctgtcactgtcattgtcagtaaaatccccaccatcattgagattgtgaatgataccatcagcctggaggtcacagacagccttgattccatcgctagtttaaacccagaggaggggggcaacctcaactacgcaataagcgatgacttgattgctaagattgacaatgggcagattactgcactcagtgaaggcagtgccattataaccgtgtcatttgacggcaacgacaagtatacaaaggctcagaacaaaagcatcaagattattgttaacctgaaagaggccagcgtgtcggcattctcgaacattgacctcctggtgggtgagaatgataccctttctccaaaaacctccccggaaggactggatgtgcggtatgagtctaacgatacatctgtggtgctggttgacaatggccaggccatcgctgtgggcgagggcaatgccaccatcacattgactgtcggcggcgatggagtatatgctgaaaatacgacaacagtgaaagtcagcgtgtcccggattgctaccatgattgagattgaaaaagacaccattgaactgaaagtcaatgaggagtcccccatcggggctatcttggagccggatgtgggcaacctgacttacagtatcagtgatgagagcattgctaaagtggaaaacggcaagataatcgctttagctgaaggaaacgcaagccttagcatttcattcgcaggagatgagagatacattggaacgaatgcaagtgtggagatccgcgtaaataagataaacaccatccttactgagacagacataacgacaacctacaaggaggagggctaccttatagcaacactgaaggacagccagaataatcccatcagcggagctgtactgacggtggacctggatggaatcaaaaactatacaactgattccaacgggcagatcaagatagcgacaaacaatctgattcccgacacttatactgcacgcatcagctttgcaggcaacgagaactacagctcctctaatggaaacgctagtgtgaccgttaaaaggatcggtacaaagcttaatttcaatgacatgaacactaccgcctttgattccaacatcgaggggagaatcggggaatatttctacttccaactggttgactgcgatggaaaccccctagccaacaagaaggttatcataggattcaatggggtcaagtacaacaggcagaccaatgagaccgggtgggccaagatccagatcaacttgaaatatgccaattcttacacctttgcaatcgccttcctcggagatgacaactacagcggatcattcaactttgcagtgatccgcgtgagccaacagacccctaaactgactgcaagtagcaagacctataagtcgtctgctaagaccaagacactgactgccacactcaaatcctcttcggggaaagccatcgcaggtaaaaagatcagctttagactcaatggtaaggtctacacagccaacaccaactcattgggtgtggctactgtaaaggtctctttaaacaagaagggaacctacagctttacagcgcagttcagtggtgacagcacctacaagaaggtgactaagacggccaagctaaccataaag

SEQ ID NO: 16761 - DNA, 4530 bp, synthetic construct
  source 1..4530: mol_type = other DNA
ttcgactataattttacagacggcatcgtcattgaccggcctgtgacaattatcggcaatggacacaccatcaacgccgctgagatggtccggatcttccacattcaggcagacaacgtaaagatcaaaaacattaccttcacaaacgccatctcaaacggatacgggggcgctatctactggcagggagccaatgccaacctctccagttgtctgtttgagaataatagtgctgtaatggctggggctgtcgcgttctatggaagcactggcagtatcgtgtctgactgttccttcatgaataattccgccaataacgggggtgcaatcatgtggcaggtcagtgatgacagcgtggtgtcggattgcagcttcatgaataactctgccatacagggcggtgctatctactggagctccaacgacggcgtggtgtcggattgtagttttgtgaacaactccgctgtgcggaatgggggagcaatctattgggaaaagaataatgggaatgtgtccggctgtatcttcgtgaacaacagtgctgacaacggggccatctacttcaacaatcagaactttgggcaaaatctgacaatcaaccacaatattttcctgaacaatgatgccgtcgcaatctactttgtgcgcaacgactccgcctccaatgcagattacaactggtttggaaataatgcaactaactgcgatatcgcgccaaccagcaataatatggaaatgaacacttggctgttcttgaacgctacctccgagccggaaggcatctctatccttgattcatgcgacattatctttaagctgtacgcctatgctccttcgggagtctcagagtacgatagcagcaggctgaaagagattaaccttaccgtgacgccaacgaacggaaggatcaatacgacccaggccaagctgggagagaaggttcactacaccccagagagtgccgaatgcatgctaacagccagcatagaaaacgccttctacacgacaagactgaaaatctcagacggaacaacattccgtgacctcaacaatctcataaaccgcaacgataatgacactattattttggataatgacttcatctacaactccctttttgacagtaaatttaagaacggaatcaatattaaccgacctttgaccatcgtgggcaataactacaccatagacgctaccggcatggcacgcatcttccgtattcaagcagatgatgtagagatcaacaacattacattcgccaacgctaaaatagacggcaatggtggtgcgatctattggtactccggcgcccggggtattgtgtctgattgcagtttcgtaaataattcagctaagatgtatggagccgccatctattggaacggggctaacggcaatgtgtctgattgcagctttgtgaatagcactgtgacggatgagcatggtggggccatctattggcacggtgccaatggcgtggtttctgactgctcctttgtgaacaactctgctaagaagtatgggggggctatcttttggaacgctgccaacggagtggtgtccgattgtatctttgtgaacaacagcgctaagagctatgacggtggtgctattgtatggaacgaggggctgaacggggccatttctgattgcagctttgtgaataactccgccaacgacgggggtgccatcctttggaacgaagccgctggcggtactgtgtctaattgtagtttcgtcaataactcagctaacaagagcggtgctgctatctactgggattccggggcgcgaggtgtggtgtctgattgcagttttgtcaataattcagcgaataggagcggcgctctatactggtttgctaatgatggggttgtgtctgcttcgatttttgtgaacaacagtggcgacaatggggttctgtacttcaataatacaaacaagcgaaacctgagcatcaatgacaacattttcctgaacaacgatgtcgtggcaatatatttcgttaacagcgattccacttccaacgcagactacaactggttcggaaacaatgcaagcaattttgataccgagccattaactactaacgtggaaattagtacctggctctttttgaacgcgacagcagatcccaacccagtggaaattctaaattcctcagacatctcctttaagctatactcatacaacgccacaggaattagcgattacgacaatagccagctgcagcccgttaatctgaccctgactgcaactaagggtgatgtcgatagcatcgctaagctgggggaaactgtcatatacaatcccaccagtcttggaacaggaagcgtaactgcaaaagtggagaacgtcgcatattctattgagatcaacaatataaagtccaaccccaacctctcagtggagtccgatgaactgacatacggcaacaacatcgccattgcgcttaattatgagtctgctgctaccggcaaagtcaacattacactgaaaggcaagaaatcagattatacctttgcagatttggacttaaatgaaacaatctcactgggaattcttgctgctgacgagtatgaggtcattgtggaatactccagagacgagatttataccaacgcaagcgcaaggggaactttaaaggtcaacaaagccaactcaacactgacagtctccgatatcgagtttgattataaggacatgggatctggtgagatatcattcacgaacgcaactggtgttgaggccaaagtaataaatcatgacgaagccattgttttcgtgagaggcaacactataactgtcctcaatttatcggccgacagctatatattggaggtcacaactatcacggacgaaaatcacaacgaggtcagcaagaatgcaaccattacagtgagaaaggtcaattctaccatcaatgtgaacgacattgtcctgtattacggcgaatccatcaacctggccgtgaccaccgacggggccattggaatatctgctgatatcgacggcgagaacgttgagctcaatgaaaacatcgtgacaatcccagatgatttggaatctggaaatcacacactcaccattacaacagttcctaacgacaaccataaggaggccagcaaaaccgtgaatatcgttgattgtaggattggcaatatcactgtggtggtggatggcgttgagtattctattcccgccgtcaatggcactgccattaccaccaatatgccggaggagattgagaagctcaaggaaaatattaccgacctgactgggcagttggaagaagcacagacaaacgcaactaacctggcgaacaacctcacaattgctaatcagatagttgacaagctgatcgcccagctggaggaagcacaggccaatgctacgcagacaatcaatgacctgacccatcagcttaatgaagcccaaaccaatgcaacgaaaatagccaacgaccaaacaaacgccaatcaaatagtagacaacctaaccggccagcttaatgatgcccagaccaacgcaacgaagattgctaacgacctcgagaatgctaatcaaatcgtggatgatttaactcgccagctggaagaggcacaggccaacaatgatcaaaccatcaacgaccttactcatcagttggaagaggccaaagttaacgcaactaagatcgcgaacgacctcgagaatgccaatcagacagttgacaatctcacaacccagctggaggaggcaaaagtgaatgccactaaaatagcgaacgacctagaaaatgctaaccaaatagttgacaatctgactgaccagcttgaagaagccttggctaatgccacgaagatcgagacggtggttgtcgacgggaaggagtaccctatagaatatgtgaacggcaccgcaacagtaactaccaattcgacagggcctcaaaacatcacccacgagagaaaagccacccagatcatttataaggacatggaaacaaccgccatcgacaccaaagtggatggccggatcggcaagtacttcaacgtcattctcaaggacagcgagggaaatattttagcgaataaacccattcagatcggcttcaacggtaaggtctataacaggaccactgacgagaacggatccgctaaactgcagatcaacctcatcaaggcagacatttacacatttgctatctgttacctcggcgatgatgattataacggcagcttcgtagtatcaaaaatcaccgtaaaagcgcagaagggcaccctaaccgttcccaacaaatcttacaaggcaactacaaagaccaagacgctgagtgcaacattcaaggccgcaagtgggaaagtactcgccaacaagaaggtgtcattcgttgtgaacggaaaaacttactctgctaagaccaacgccaagggtgtggccactgtcaacgtcagtttgaacaagaagggaacatacagcttcgtggccaaattcgcgggagacaacacctacgctgcagtcagcaaaaaagccaaactgacaataaag

SEQ ID NO: 16762 - DNA, 4380 bp, synthetic construct
  source 1..4380: mol_type = other DNA
tcacatgtggaggtcgatggaatagacattaattacacagatctggagaccatcacagttactgtgtcggataataatgccacaggatttgtgaccattacaatcaacggcaccgatatcgaactgacgaaagaagtttctgcaggtcaagccgtattcgacgtgaaggacctggtggttggagaatacaacgtaactgccgtttaccacagcgacaggaactacttgaactccactgcgtccgatacattcaaagtcgacaagtcagatgtcaagaacatgaccatcagtcctgtaaacattacctatggtgagaacgagacaattactgtcaggatcaccgacaacaatatcacaggcaatatcaccatttctgtaaacggcaccgaatatggtcctgtggaacttgacaatggtgtggcagtctttaatgtgcccggattgatcgtaggtgactatgaggtgacggcctcgtactcgggggactccaactataatcctgcaagctcaaccgagacatttactgtggataaggagaaaccaaatgtgcacgtggtctctgaaaacatcgactatggaaagaatgagacaattacagttattgtagacggatttaatgttaccggcaatgtgaccattaagattaatggcacagagatcgcaactaaagaaattaatgataaagggcgggccgtttttgttgtgcctggccttcaggccggtgaatatgaagtggtggccatatataacggggatgataatcacgaatcttccgagggaagtgacacattcacagttgctaccgtcacaccaaacatggacgtggaaactgaggacatcgactatggcgacaatgagacgataacagtcaccctccccaaagatgcgaaaggtagtgtaaacataaccattaccgatgagaatgggacggtggtttacgagggggaagctcagctggaagatggaaaggccacggtggacgtgccaggcatcacaccggggccatacaacgttacggtcaagtatccgggagacagaaactataatccaaccaataagacagtccgattcaatgtggataaggtagtgcccgatgtcgatgtcgatactgtgaatattgactacggcgacaatgagacggtaactgtgacagtgaaccctgtggacgggggcgtcacgcctacaggtagtgtgaatgtcactgtccgcgactctgatgggaaagtggtgtatgaaggcaacgtagacctggtggcaggcaaggccaccttggacgtgcctgatctgggtgcaggagattacactgttgatgtccgctatggcggggactccaactacgatgattcaactggaggatcaagcttcaatgtcgccaaggtctctcccgacatggatgtgcagacggaagacattgattatggcgacaacgagacagttactgtgaccctgcctaaggatgcgacaggcaccgtcaatgttaccatcaaggataacgacgggaatgtcttttatgagggtgaggctgagctcaaggaggggaaggtgactgtggatgttcccggactgcccgctggcgattacaccgtggacgtcgcctatgggggggacgataactacaacccagtcaacagttccgactccttcagcatagacaaggtgagtcccgaagtcgacgttggtactgagaacatcgattatggggacaacgagactgtgacagtcacagttaacccggtggaaggaggatctgctcctacaggcactgtgaatctaaccgtgaaggatagtgacggcaaagtggtgtatgaatgccaggcagaccttgtggaagggaaggctactgtggatgttcccgggctccccgctggcgattacactgttgaggtggcttatggcggggatgagaactacactgctacaaactccaacggaaactttgctgtggggaaagttaaccctgacatggaagtggatggtgaagacattgactacggtgacaatgagactgtgaccgtgaccctgcccaaagatgcgacaggcactgtcaacgtcaccgtgaaggatagtgacggcaatgttgtgtatgagggtgaagccaagctcgatgatggcaaggctacagtggatgttcccggtctccccgctggcgactacactgtggaagttgcgtatggcggtgacgataattacaacccagtcaacagttccgattccttctccatagataaggtagctcctgaagtcgacgctgacaccgaggacatcgactatggtgaggacgagccgataaccgtgaccatcgaccctgtggaaggagggtccactcctactgggacggttaacgtaaccgtgaaggacaaggatggcaacgtcgtttatgaggaccaggtcgacctcgttgacggcaaagtcaccctagacattccagacttagatgccggcgactacactgtggatgtggcctacagcggtgatgagaattacactgccaggaactccagcggaagctttactgttaacaaggccaaaccagagttgaatgtagattcagaggacattgattacggggatgatgagaccattacggtgagtcttccagaggatgcaacaggcactgtcaacatcaccattacagataaggacggtaaaaccaaggtcttcaacgacgtgccgattgaaaacggcaaggctacaatcagcgttcctgacctcgacgccggagactataatgtaacagtagactacccgggagacgacaattaccttggctctaaagctacttcatcgtttaaagttgtcagatcaaacagcaatatcactctggagacagagaacatcacatatggtgacgaagaacccataactgtggatgtgaatccagtggaaggaggagtcactcctaccggtactgtcaacataaccatcacagataaggacggaaatactaaagtgttcaatgacgtgcccctggaaaacggcaaggccaccgtcgatgttcccgacctcgccgcaggaaactacatcgtggacgtcaaatactccggtgatggcaactacgacccagacagcacagagggagcctttgaggtggcaaaagcagtgccccacattgaaatccacgtatatgacatctactatggggatgtagaagtgctcacggtcacatgtgatgctccagggaccgtggacatcacggtaaatggagtcaccgtaacagtacctctggatgacggatatgacaagcgagtattcagttcaatcgttcgggcatacagcggcaaggcaaccctcgaccttgtcaacctggccgtgggcacatacccggctaaggcagtctacaacggaaatgagaactacacctccgtcagcgacaacgacacgttccacgtgtacaaggagaataccacgaccaagatatctgtggacgatatcaagctaggtgaagatgcagtgatcgatattgaggttacccatgaggacggctctgagaagatcaatactaacattactgtaacggtcgatggaaaagattataccgttgagctcatcgacggaaaagggacgttaaccatccctgatttggacctgggaaagcatactgtcaaggcggtgtaccccggaagccacaactacacaaacagttcaaacgccaccagctttaaagtgacaaaagtgaccccaagcttcgatatctcaacggagaacatccaggtcggagacgacgaaaccgtgactgtcactctaccagatgatgccacaggaaccgtaacccttaccattgacggaaaagagtataccgccacagtggagaacggcaaagccacatttgtgattcccggcattaaggcaggcgagcacaaggtcaatgttgcatacagcggggacgacaagtacgcccctgctaaaagaagcgactccttcacagtgagcaaggtgaaacctgacatgggcatggacgcccccgaaatcaaagtgggccaagacggggtgatcaccgtaaccgtgccagaggatgcaacaggtacaataagcattaccgtcgatggcaagacctacactgccagcatcaaggatgggaaagcggtgttccatatctctggactggggccaggcacacacattgtcaaagcctactactctggtgacggcaagtacttggctggctctgtggatggaaccatcgtggtggagcccaagaacgggacaagcccacaggacaagggcaaagctcatggggggatcgacctggaatccaagaagaccgggaatccaatattagtgctgttcatggtgctgttcagcctgatcctgatccctatcaaaagaaggcgcgacgatgatgaagaggaggagaatgaagatcaaattaaccggatagat

SEQ ID NO: 16763 - DNA, 4662 bp, synthetic construct
  source 1..4662: mol_type = other DNA
aaaaccgttactgtgattggtggaattggccaggtgaattttggcagcctagaaaccgacacctatgaagctacagtatccttcggagggagcgatctctatgagcccatctcaaacgctaccgagtttacagtatatcccgaagaggaaggcaccaattttgagattgatacaaatgcctccgaaatcacatacggggctagcatcaaagtgactcacaaattgccagaagatgctactgggaccatcaaatattacctgaacaacggcactgtgctcggggagctgccggtggaagagaaactgacactggaccttgatgctggttactatgtcatttttgccaactatagtggcgacgagagcttcgagcccgactgggacagtgccgatgtcctcgtgaagcaagtagaaacagagtttcatattggcctccagcagcaggtgatatccggcaatcctgcctatgtcacccattccatatccgagggcgctaccggcacaatcagctactatctgagtaacgggaccttccttggagaggtgcaggtcggcgagacatatgtttcacccaaatggaaggtcggaatctataacattaccgctaactattccggagaccggaactttgttccggcatcggacagcatggaatttagaatcaatcctgacttctcgttcgacatatacctggatgaggacgacgtgatatacggccagaccactacggtgagaccaagcttgccctatgacgctactgggaccgtggagttctactataacgatacatatctgggcaaggtgacaattggccaatatgaaatcattatggttgacggagaggaatactacgaaactccaggtgtggagcttcccgagttcgacgtgggtgtccatgagatcgtaggtaaatatttgggggacaagaattatgaccccgctatcgccaacgtaaggctcactgtcctaagtaccgaaacagtattcgagatcaatgcaagcccaagcgaaattaaatacggagaggctgccgctgtgatccataaactgccaagccttgctgttggtaccatcttatattacctgagcgatggaacttccctcggcgaactatactactacgaggatttagcattgcctaaactcgctgtggggagctatgagattctcgccaactattccggagacgagaatttcaataatgcaagcgctagcacgaccctgaccatcaataaggccgatcctgatttcgagatctatatcgccttcccctcctatgacttcggtgatagcccagtggtcttcgttaacttacctgacgatgctacagggaatatctcatactatctgagcgatggaaccttccttggtgagctgccggtagatgaacggctgtccttgcccattctgaatgtaggaacccacactattatagggaactattcaggagacggcaactacaataatgcctccgcgagcatgacagtgactgtgaatgaggtgtccatggagtttaatcttgggatcagcgcagaagagatcagctacggcgaaactgcaacagtcacccaccgcctgccaagccttgccaaagggaatataacgtattatctgagtgacggaacactcctcggggagcttccggtcagcgaaaacctgaccttacctaagttagatgttggaacttacattattatcggaaactactccggtgatgaaaattttgacggtgacagcgcaaatgtgaccctcactgtcattcaggcggatcctgcgttcgcaatcagcattagcgcagaggaagcggcctacggcgaaacagtgactgtgagtccagccctgccagaagatgcaacaggaacagtgatttactacctaagcaacggtacaatactaggcgagctcgcagccgacgagaacctgaccctgccaaccttcgatgttgatgtctatgatattttggcaaactattcaggagacaagaactacctcaatgcaagtgccgaaacagcactgattgtgagccaggcagaccctggattcgagatcagcatatcggccgaggaagctgcgtacggcgagacggtcacggcaagccccgttctgccagaggatgcaacaggtacggtgatttactacctaagcaatggaacaatactgggcgaactccccgtggacgaaagcctgaccctgccaaccttcgatgttggcacttacacaatcctcgcaaactactcaggggacagcaactatctcgatgcgagtgcagaaaaagagctgaccctaattaaggccgattctaccctggagatcaatgatattgcctttgactactccaagacgggctcagccgaagccaagacttcgggcgcagagggtatcgtggcttcagtggcgggccatgacgaagccgtggtcgaggtgaacggaaacgagattacggtgtccgggcttgatgcagggagctataccctatccgtttccacgatcgtagacgataaccacaacagcgcaagcaagaacatcacagtcacagtcaaaaagatcgatagtagcctatccgtggaagggttagagctggactatggcgaatcaggcaatgttgatgctgccgctgagggagctaccggcatcagcgccaagatcgggagtaagagtattggagtgaacggttattccatccccatttccggactggatgccgggaaatacaacctgacagtgactactatccctgacaggaaccacaatcccgtgacgaaaacagcccagatcactgtgaacaagatagattccacattggaggcgaatgacatggccttcgattacgagggcaccggcacaagttcagtgacctacaccggggctaccggcgtaaaagcttccgtaatcggtcagccaaatgccaaggtgaatgtgaaggggaaggagatttccgtctcaggtttggatgccggaaactatactctggaaatcactaccatccctgacaagaaccacaaggctgtaagccaaacagtcaatgtgactgtcaacaagatcgattcaaagttagacttcaacaaccttgtggactacggatctgccatgaacgttaccgtgaagaccgagggggctagtggtattatggctgaaatcgacggaaaggaactcggcgtggacaagtacacgatccccatctccgcgttggatgccggggaatacgaccttacggtgacaactatccctaacagcaaccacaatcctgtcagcaagaccgtcaaagttacaattaccaagctcgacagtgagctggctgtggaagaccttgagtttgactacaacagcactgggactaccaatgcaacttttgagggtgccacagggatcacagccaaagtcgtcggccagccaaacgccaccgtggagataaatgggaattccatcagtgtttccggattgaagcccggaagctacaccctggaagtcactacggtccctgatgagaaccacaaccccgttacagccaaatctgcgatacgagtgaacaagctggagaccgcaatttcagccaatgacataagcactgtccacggcgcagacaaaaacctgaccgccatcataagggacatcaatggcaatcctgtagccaatgccacagtgtccgtcagcctcaacggcagcaaaaaatatgtcagtgattcaagcgggcagatttcaattccgttgaagtcgcttgctgccggcaactacacggctacaatctcgtttgctggcacagagatttacggcaagagtagcgcgtcgatcaaagtggctgttgacaaggagccaacatcaatagctgccacaaatgtcaatactcagtatggcctcgaggactatattacagcagtgctgaaagacgggcaaggcaatcctttgggcggagtcaagctgaatgtagatctggacggcaacaggacgatcgttaccgactcaaacggtcagatcaagattgctaccaaagatctgacagcaggcaattacattgcgacaatcagctttgctggaaacggaaactacatggcctccgagagtaatgccatcgtcaacatcaacagaaccggcacacgcttcaacttcaagaacatgactaccaccgcattcgattacagaatcgaaggacgaataggtaaatacttttacttccagctcgtggacgaggatggaaacccattggccaacaagaacgtatgcatcggattcaatggggtcaagtacaaccggacaaccaatgaaaccgggtggaccaagctgcagatcaacctgcgctgtgtgaatctgtacacctttgcagtgacatttagcggggacgacaactacaccggggcattcaatgttgccatgatcaatgtgacacatcaaagccctaaattgactgccggcaacaagagctataaggccagcgctaatacgaagacactcactgctaaatttaagagtttcaagggaaccgctattgtgggtaagaagataacctttactgtgaacggtaagaaatactcagccattaccgataaaaaaggaattgccactgtgaacgttagccttaacaagaaaggtacttataaatacactgccgcctttgctggtgacagcacttacaagaaggtgagtgttacttccaagctgactataaag

SEQ ID NO: 16764 - DNA, 5781 bp, synthetic construct
  source 1..5781: mol_type = other DNA
atcaacggaaacgggtttacaataaacggttccaacaaagcccccatttttcacatcaccggggataatgtgaccatcaataacattagttttgtgaatggatatgcaaacgcctacgttaatggctacgacggtgaagatatgaggggtggtgccatctactggcagggcaggaacggcaaggtgacatacagcaacttcaccaacaacaacgccaacgatgggggggccatttattggtttggtacagatggtattgtagaatattcaaatttcattaacaacaatgcaaatgatgggggggcaatctattggtttggtacagatggtattgtcgaatacagcaatttcattaacaacaatgcaaatgacgggggtgcaatctactggtttgggcagaacggcaatgtcgaaaattccgtcttcacccaaaatcatgccggctcttacggcggtgcgatttactgctctggtgctgagtccattgtggagtacagcaatttcaccaacaataacgcatataatgggggtgctatttactggtttgggcaaaacggcaatgtcgaaaattccgtcttcacccagaaccatgctggctcttatggaggtgcgatctattgttctggggccgagagtattgtagaatattcaaacttcaccaacaataatgcatttaatgggggtgccatttattggtttggccagaacggaaacgtcgagaattccgtcttcacccagaatcacgctacctttgcgggaggtgcgatttactgctctggtgctgagagtattgtaaaatacagcaacttcaccaacaacgacgctatcaagggtggtgccatctattggaacgggcgaaacggcaacgtcgaaaactccgtcttcacccaaaatcacgtggacaatgacggcggtgctctgtactgggacgatagtgaggggaaagtcacttcttgtatatttgtgaataatactgctgagactaagcacagcggccatcttatcttgcctatgggacgaggtggggcaatctattggaacggtcgaaacggaaatgtcgaaaactccgtcttcacccagaatcacgtggacaatgatggcggggcactgtattgggttgatagtgagggggaggtcacttcttgtatttttgtgaacaatgctgcagatgttgaggccagcgtgtattataatgagcggggcgcctactccaattttagcaataacattatgctgaataatggaaaaaacgagattaagttcaagatctttgatcgcagcaatatagactacaactggtttggcaataatctgagcaattacaacgaaaagccaggaggctttgagggcaatatttggctgtttctgaacgctacagtagacccgaatatgctcctgcttggtgaaagttctgaaattacatttaggttgtatgcctatgatggaacaaatgttattgaatatgacaatgatctaatttaccctatcaacctgactctgatttcaagcaatggcaacatcaacgaaactgtggggttggaggaaacagctatattcactccccaaaatgtcggaacggccatagtaactgcaaaagcggaaggctttgacatccagacagtgtcaatcaatgttcgggctgccagcttcagtgacctgaaccggaccatcaatggcaatgaggatgccgaaatcactttggggaagtactatgagtttgatccagaaaccgatggggctttcatacatggaataatcattaaccgcaccgtgacaatcaacggaaacggcactacaattaacgcatcaggcaaagcccggatcttccaggttatcgctgataatgtgacactcaataacattacctttacaaacggaaatgcaagcggcgagggtgccgataggagtggaggcgctatccggtgggaaggggctaacgggattatctcatactccaatttcacctttaaccacgcatacctgacgggaggggcgattatctggtccggtgagaacggtactgtcaagcactccagtttctctcagaacgatgtggatgggtctgggggagcgatcaggtgggctggtgctaagggcaccattacagactccgatttctacctcaacagtgcaaccgatgcaggggccatctggtggcttggtgcatatgggacagtcaaatactccaatctgatcaacaaccacgcaggtagtcgggggggcgctatcatgtggagtggtgagaacggcaatgtgacctactccaatttctcgctcaataacggcggatccggcacggggtacgatggcgggggcgctatcttttgggatcatctgaacgggactgtgagctattccaatttctccaacaaccacataaatgggcacggaggagctatcgcctggcatgaacagtacggaaatgtttcctcttgtctgtttgtaaacaacactgccactgacggcgctagcgtgtaccataatgaccattcagagtcatattccaatttcaacaacaacatcttgctcaacaatggggagaacgagatccactatgacgtatacgatggctccaatgcagattataactggttcggaaacaatggcagcaattacaatgagaaacctgcaggcagcgttggcaatgtatggcttttcctgaatgccacagccgatccaaacccaatatctattctgggtagctcagatgtgagctttaaactgtatgcctatgatggactggaccttatcgagtatgacaacaacctcctgtatccgatcatactgagcctgagctcaagcaacggaaatatcaacgacactgccggattggacgagaagataatattcacgcctcagaacattggcactgccacggtgactgcaaaggcagaaggcatcttccaaaccctgtcaataaatgtgtaccctccaagctttagtgacttaaacagaaccattaacggcaacgacgatgatgagataactttagacaagtactatgagtttaaccccgagttggattcagctttcattcacggaatcatcatcaaccgcacagttacaatcaatggaaacggaagcacaatcaacggtagcagcaaagcccggatcttccaggttatcgcgcctgacgtggtcctcaataacattacctttgccaacggcaatgcgaacggggagaatgaggggggctatgggggcgcgatcctgtgggaaggcgataacggaagagtcgaggactcaaccttcatcaacaacaatgctagcggatacggtggagcaatctttggaggcaactgctcggataacgtgattttccagaacaaccacgccggcatagaaggcgatgactggtacgtccctaagcctgtgatttccgtcaatgacttcacatccacatataaatcaggagagaagctctatgtcaatgtgtcctatgtgggcactcagatcgacggaatcaatgtgacaatctctgtgtttgacagttccaaccagctgattggcaactattcctgcctcagcggtgacggatggaccgtggacttggatgctggaaactataacgctctggtttttgtggatagcgatgaatatggctacggagaggagacaattgccctgacaatcaataagcgcgcttctcaaatttcagctaacccattgaacacaacatacaacggaaacgagaacattatcatgatccttaaagacaactacaatgaatccattgccaatgctacggttttggtggactttaatggggagaagaacctaacaaccgacgagaacggtcagattgtggtgtccgcgaatggcatcgtgcccggagaatactgggctcagttcatcttcgacggcagcaaaaactacgacgggtcagatgagaaggttaaggtgattataagtaaggcttctaccagcctcagctcagagaatatgaatgttagctacaatgagagcaaatacctgatcgctacattaaaggaccagtactccaatcccctggccgaaatcagcatagaattcaaatctaactcatcaaccgtgaagaacgagaatactgacaacaagggacaggccaagctcttaatcgacttcaacccaggaacttataatattgatatcagtttcgctggcaacagcctgtatgatgcctcgtacgctactgtgactgtggtagtaaacccctctgatgactccggaaacggcactgagccctcgggcaatggaagcagtggcaacggtacgagtcctgaaggaaacggtacttctcccgggggtaatggcacctctccgagcggaaacggcacttctcccggggggaatgggacgtctccaagtgggaacgggacgagccccggcggtaacggtactgaccccggtggcaatggcacgtctccaagtggtaatgggactgaccctggggggaatggtacctctccatcgggaaatggaactagccccggggggaacgggaccgaccctagcggcaatggaacctctccgggcggaaacggaactgaccccggggggaatggcacctcttcaacggtgaaagacacgctgataggcattagcacatccaccgtcatatatggaaatgacgagcttatcaatctgaccctgacaacggcagacaaaactcccattgatggggtcattgagctccgcgttggcaattctatctataatgtaactattacaggcggaaaggggtcgaaggctctttccaaccttactataggcaactacaccgtgactgccgactataaaggagattctgagtacaactcgtccactgccagctctagtttcaccgtgagagaccgtatcgaaacccgcatcatatacaacaatatgaccacggcccctgtgggtgccaatgacggcagaatcgggaattacttcagagtcaaattggttgatgagaacaatcaagctctagctggagtgccgatccagattggcttcaacggcagaatctacaacaggaccacagactctgaaggcggagcaaagctacagataaaccttgctaaggaggacggctacacctttgcaatctgcttcaaaggagacgacaactacaacgcatccttcgaagtggccaaaatcgacgttaacaagaagtatccaaagccaaacagtgccaactcagagtccgccgaaccagcaaacaagacacagaagaacacaagactcgaaacctccatcctctacaaggacatgaaaaccgagtcggtcctaaaagcggaaggccgagccggaaagtacttcgaaatccagctagtggacaacaacaaaaaggctttagccggcgtgcctatcaaaattggattcaacggagtggtctacgacaggataaccaatgccaccggaggcgcaaagctccagataaacctcctgaaggtgacccaatacacattcgccatcgcctacctcggagacagcaaataccaggcctcattcgaggtggcaaagatcacggtaaacaagcaaaccccaaaaatcacagcccctcagaaaacatttaaggccaaggcaaaaacaaaaacagtcaccgccacacttaagtcacagcgtggcaccttactaagcggcaagaagatcaagtttacagtaaacggcaaaacctacactggaacaaccaattccaagggcgtggccagtgttaaggtctccctgagcaagaagggaacatacaccgcgactgccaaatttgatggcgatgccaacacaaaggcaaccagtgtgaagttcaaggtgaaaattagt

SEQ ID NO: 16765 - DNA, 4356 bp, synthetic construct
  source 1..4356: mol_type = other DNA
gccattgccatgtttaccgatgagaagatccgaccggtgacagagaacacagtcaaaggggctgacaatgaaaaggtcaattacaccgcagtcgtgcgcgatgtggacgacctggtggaggatgccgaggctacaatcactccggatatcctctataacgggaatctgggcaaggacctggcctatcccgctgaggagatcacattctttgactccatcacagtgaacgggggcatttacattgagatccagaatgattcaagctaccttgcatctggagctaccaaccggactgacatatggaacattgaagcacccgaagacgcggatttcgttgcggggtttgtctatgtggcttacaactgggataagacctctgccggtatccctgccctgaacatcacattcaatggggtgagcgtcgcccctgttgcccattaccgcgaccaatccaatatgggcacctatggcaagtatgggtacggacttctcgtatatgatgtgagcgacctgctcgaggcaggggataatgtcttcacccttacaaaagatgctaacatgactgccatctatccaagtgtgttggttgctggctacgaccaggaggtttctgacagcatgaaaaccatttacatgttcaacggcgccgaccttttgtccaatgcaaacaacttcctgggaagggttgtggcgtctaatagtgttcttgacattgaattgcccgacgatgtgattgactgtgcacttggaatatttgccgcaagctctcagaaaggcgagggcaatctaatagtgaacggcgagagctttgaagatgtgtggaacggttcttccaattcagtccaggcttgcgtgtttaacttgacagacgatatcgaagagtccaacacagtatcatttgttgcaaccgggagcactatactagcccttcagcagttcatctttgtggagtacgagcttgtgtctgtggacgctaaactgggctctgagtacaataacgtggcatttgcggggaccgacaatgtcctggaatttaacattaccaatgacggaacaattcctaccgcctacaccattgagttctatatcgacggcgagttggcggacacgctggagctcgagctggcaaacggtgaaagcgacagcctatacctggtggacccaaccatcagaccagtggatgaaaccacggtgaacggcgccgacaatgctaaggtcaactacacggtggttatcacagacaattcaactggagatgtcctggatataatcactatcacgccctctgtactctacaacggtaacctcggcaaagacttggcatatcctgctggagagatcactttcttcgatgtgattaccgtcaatggagacatcattgtcatagggatgaatgattccacttatcttggctctaagacaacagggaggactgacgtatgggacctgaccactaatgaggatatcatctttgcagccggatacctgtatgtggcatacaactgggataagaccccggctggaatgcctgtttggaacaccacattcaatggcgtgacggtcactcccgttgcccactaccgagaccaatccaatatgggtacctacggcaaatatggctacggactgatcgtgtacgatgtgtctgacctgattgtcgctggtgaaaacacattcaccctggagaaggaaaatggaaccacggccgtgtatccaagtaccctggtagccttctataatatgcccgaatccagcacgtatgtcactacatacctatacaatggcgcagacttactgtccaatgcaaacaacttcctggggagactcgtggccagcaacagtacattggacatcgattcatttgacaatatagtcggcgctgaccttctggtatttgccgctagtgctcaggctggagagggtagcctggtcataaatggcgatctggtcgctgacatctggaatggcagcagcaacagcgtcgatgcatatgctatcgacctgggcaaaaacccgaaggcctctaatgaggtctcatttgtggccaccggatcgaccattctagccttgcagcagttcattgtggtggagtacaatgttccttcagctgaggcaagtctcgtgagcgaatattctaatgtggcattcgctggaaccaacaatgtgttgcagttcaacctaacaaacaacggcgcgctgaatacttcttacattgtcgacttctatattgacggcaagaaggttaacagcacgcagattgcactcaactctggcgagagctttggccagtacttcatcgatgatacaatcaggccagttgacgcatccacggtgaacggcgccgccaatgcgaaggtgaactacacagtcctggtctcggataaggataccgggctcatattggatgaagtgaccctcacgccttctgttctgtataacgggaacttaggcaaggacttagcccatcccccagaagaaatcgtcctatttgacacaatcactgtcaacggggatgtgattatcgatacattagatgactctacctatctgggggctaagacaaccggacgtactgatgaatggaacctcaccgttccttcagatgctgatttcgaagtggcatacctgtatgttgcatacaactgggataagactgccagtgggatgcctgaatggaataccaccttcaatggtgtaaatgtcacgcccgtggcgcactacagagaccaatccaatatgggaacctatggcaaatatgggtacggactgtacatttatgatgtgtcagacctcattaaggccggtctaaacacattcacccttggtaaggaaaacgggacgacagcggtatatccaagtactctggtggcactgtataatgtgaacgagtcaaatgttctcacgaccgtttccctcttcaacggtgccgacctgctctccaatgccaacaacttcttaaacaggactgtggccagcaataatgtcctggagctggatttcactgtttttgatgagatcctatcctcccaactctatgtctttgcggccagcgctcaagccggagaaggaaacctgattgtaaacaatgagacattcactaatgtctggaatggaacttcgaattccgtggatgcctatattgttgatctgggaaatgacccttctttatccaatgacgtgtcatttgtggctaccgggtctacaatcctggcactggagcagtttgtcgtggttaagtccaaatatcagaccagttcggacttgcagaagctcatcgatgctgcggagcccggatccaccttggatctgggtgacaacgtattccaagatgtggctaatgtagtaatcgataagaaccttaccatcaaaggcggttccataatgggcaaagccggggagaccatctttgtaattcccgccaaatccgccaacggtccagatgaggttaacataacgggcgtggactttatcgtggaagatgcaaatgtcattgtgcaggccactgccgacaatggaagtagcccaacaagtatcgacactccaaacatccgcatcagtgacaacttcattgacatgatagacggaagtgtggtgcctgagagtgtgactgtattgaagctggactcggaacggggagtccttgcccctaccggtgagctcaaggtcactgacaacgcaattgccgctgggatcaagccattcgagtttgatgttactggcgtgtccaacggcagcgacaccaatattccagaaggcggtaacattcccgctaaacaggccagcgtgatccactatcaagatatggaaacaactgccgtgaactctaagattgaaggacgggtgggcaaatacttcgaagtcaacttgacagacacaaatggaaaccccttagccaataaatttgtccagataggtttcaacggggtggtgtataacagaacaacaaacgagaccggcggagtcaaactccagatcaacctggggtacaaggggacttacacctttgctatctcctacctcggggatgactactacaacggtagctttgtggtaagcaagatcaaggtaagcacacagaacaccaagcttactactgctgcaaagacctacaaggccagcgctaagacaaaaacattaactgcaacactcaagtcaagcgtgtacaacaaacccatcaacggtaagaaggtaactttcacagtaaacggcaaatcctactcagccactacaaacgctaaaggggtggctactgtgaaagttagcctgtcaaccaagaaaacctacagtttcacagccaaattcgctggagacgatatgtacaccaaatcaagtgtgacaggtaaggtcactataaag

SEQ ID NO: 16766 - DNA, 6801 bp, synthetic construct
  source 1..6801: mol_type = other DNA
ctggaaccacaaaacttcacagtgttcgaaaacccatactctgagctggaagtaactgatgacggccccatcgcctctggggaaactgtcaacatcacagctaccctcactgacttccagggcaaccctatagagggagccacccttgaggtatatgacaccggcgtatggattgccaatatcactaccaatgccgaggggattgcggagacctcgatcgacaatctgggatatggtctgcacgacatcactgtgattttcaatgacacggtccacgacgtccagactgagaccgtcacggtcagtgtaacgcccaagaagggaaccttcacagacttgcaatacctgatcgacactgctgatgggagacttgtcttgccatacgacttcgcttttgatgcagcttatgatgagcagttcttcttaacaggtgtgctggtggacgataacattattatctctggcgcgggacacatcatcgacgggatgaagaaggcaagaatcctgtacatcaatgccccgaatgtcaagatatttaatgtgagctttgtcaatgggaaatctgatgtcggggctgccatttacaccgaggctgattatctgctggtggacagctgttacttcgcaaacaacgaccctgaggctggtgctgcaatctatgctgagagcggggtaactgatgtggaggagaccatcttcttcaataacactgctgtgaacggcggtgccatctatgttgagtccggtgctacactgaacgttgctgattcagagtttaatcagaacactgcaacctaccggggtggagcgatttggagcaatgggacggtgaatgtaaaagattcctcatttgataaaaatgacatcacgtacagagttaaaaacgatgataatggtggagccgccatctttaacaatggcacattgaacgttgtcaattcccgatttacaaataacctcctgaactatgtcataagaactggagatgataatcatcctgaattggttgacggggttattttaagctctggaaaagctaaaatcagcaattcccactttgagaacaacagcggtacctatggttcggccataacggccctgcccataggcactgaactcagtgatttaactgtggaaaattgtgagtttataaccaacctcgcatactgcggggccgccatctatgtggggagtgggacgacattattctacattaatgactgcgttttcataggcaataatgcgacaggtgtcggcagtaacggatatgttgctaccgggggtgccattaagatagctaagaaagctaccgggatcattgcggattctcagttctataacaactctgcggctaacgggggagccatagatataagtgctactagtggtaatactgcatcagtacttatcgacagctgtgtctttggatataatgttgcagaccaggggggagctatctacattgataataggacaacagtcaacctctatgacagcacactttactacaatgaaggggaagccctcaattaccacatctttttgaatggagacgcaactctgggctttgaagggaataacttctatacaacaatacctaccattgtggcagaagacacctacgcctacggtgaaaccataaccattaatggtacattcgattggggagtgaacaacaagcccatcaatatgatctacaccatcaacggggcacccggcaccgcagaggtggttgatggcaattacacaatactgattgacaatcagccagatgtaggggattacaccattgtgattactgcatttactgatgagaacggaaatgtgtaccatgtagaaactgcgcagaaaacaatcagtgttacaaaagcaaccccaatcctgtcggtggaaggtgatgaatacttgatgcccccgagtgatgatgctactgttaccatctctcttaccgataaggacggaaacggtattaagggcactgtgattgtcactgtggctggtgagacctacttggttgaaacggacgaggatggggacggcgagctcaccatcaatgacctgcctgcgaccacttgggccattgacgccaagttcataggcaacgacaactataatgaggtggtgaacgacaccgaagagattaccttcatcgcggatgttgcatatttcgacataatcatcgaggacggtgtttacggcgataagctgactgtcatagtggaaaacgcaacggacatcgacggcaatagccttactggaatggtcacaggcatgatttctacaggcgatgatgacatttcattcattgtgtatgtgaataacggtcagggaaccaacacgaccactacggctggcggagtggggaaattcacgggggatgcatacttctatgattcaatgatggaatttatgtccggccccgaagagtgcagtgcatatgtgagcccagctaatgccacactttatctagtgccatgggacgcagatgatctatcatcagacattgcctatggggataccatcgagttcggcgcggccgtgtttggggtgaatctagaggaactcaacggtactgtctattatatcataaccgagctgaataaaaaaggtgagatcgcgatcgtcaacggatctggtgcggtgaacctcactgatattcttgacgttggaacctacacagtcataagctactttgtagatgacaaaggcaactacgacccagagtcctcagtgaactacactaacttcaaggtggccaaagccacccccaccctgaatgtagagaatgctcagcaagtgtatgccgacaccaatacaattacattcaatgtgacagggatcgacgacaagggggttaaaggtacagtgatcgcgattaagcccatttcagaggatgtgtcgggtgcaatctacgatccggaaaccggtctgggagaactgacattcaatggtttggtggtgggcgacaatccaattgtggtcaagttcttgagtgacgatgataactatgcaaatgcagagaagaccatcaacataacaatcactcaagctacactggccatcgactctacaataaccacccaggaaattgtgtatggcaaggatgttgaggccgatgtgaccgttaccggcatagtccaggaggatactgtaattgcaaatgtcagtctctacgacaacgctactggagaactgctggactcctttaacattgccctgggcttggaggacagcatctccttcgaggacctggaggtgggcgactactactacacaatcgagtttacaagcgaattatacgccggagacaacttcacatctgaagtattcactgtaaacacagccgagatccttgatctggattcttccaatgtagacaatgtctcctacggcgaaggaatcgacatcaccgtgtatgtggatggaatgattgaaggagacctcattgaagtgaactttaccgtggtggacgccacaaccggggacgatgtattcaatggaacttacaacatcagcaacggggacgtgatcacagtgccccccttagatgtggggaaatacagctatagtgtctccttttatggagatgataaatataacacaggcggggcagattccatcgctgcggtcggaagctttgaggtattggacatgtcggacgtagatgtgctggtcactgcagacgagagcatcacttacggtgaaaaggtcaccgtggagattgatcccatcgttagcgaagggggactgcctgtgacaggtacagctaccatttatgtgtatgatgacccagcctctgtagacccggtgtatgtgctggccgatgtcgagctggataaagacggcgcgactgcagtcctggataccatattgcctactggcgaatactggattgtggttgactttgagagtgatgatggctactatgatggccgaggcgtgaccagtaccattgtggatcttgctctagccaaactgtccatcgaccccatcaccgttacctatggcgaaaccatccccattacagtaacagctctgggcaatggcggggagctactgaacgggaccgtggagtttaagatctacggtccaggatttgaaggaacagtcacagtcaagaatgggactggagtaaccaatatcacagagaggtttgatgtgggaacctacacgatcatagccgcctttggagatgatggggctaattacgagggattcaacattacttccctcgagatcactccggccacccccatagtcagggtgactggaagtgaagttgaatatggcgaacccagcactgtgaccgtcagtgtcagtgacatcgacggcatgccactgtccgggaaggtcatcgttactgtggactgggtcgttgacgggctgacccaagtgattgaccttgacgattccaatgaggcttcattcgatctcagcccatatgtccatcagggaacatacgacgtgactgtgacctacattgccaacggcaactacggcgaggctgtcaacgacactgaaacagtgaatgtgacggcttccaccaccgctacagtgaacgtggaggtgccagaggacgtctcatacggcgatgagctaacaatcaaagtcactgctgaggacggcgccggcgaacaaatcccgctagaagcagtcaatgtgacggtgaacggtgagaccaaggagtaccctgtagatgaaaacggcacggtaaaccttggcgttttgcctgccggagataatgagatcaccgtagctctcgatgacgggactcacaagcctacaaagactgaagccacagccaaggttgctcctgccgaggctgtggtgtttgtggacacagacaatgataacccaagctatggagatgtcgtggttgtgacggtcaatgctaccaacaaggacaaacctatcgatgccgatgcatgcctcgtggtcgacggctacctcatcggctactatgaccttgaagacggccaggttgaaatctctattaaggacttggcccctggcaaacatgagatcgaggtttcggtcgccaacggaaactactctgaaggtagttacggacgcgcaattgtcaatgttgataaagcaacgcctgtgatttcagccgagggcgagacagtcgaatggggggaggtggccactgtgaaagttaatgcaaccggggcaaacggcgagaaactgaacattcctctagtggtccgcgtcatctgggaggtttctggtgtcgatgagctcattgaaattgagaacggcactggagaagctgctttccagatctccaactatgtggcccctgggacgtacaatgtgacggtcatattcctgggaaatgatgaatattacccagttaacaacacagaggccaagattatcctgaccgaaccaaagactgttgaaatggaggtgtccatcacccctgacgagtacggcaaagcgacaaatgtgactgtcacccttaaggacgtggccagcaagccactcgagggctcaacggtcaccgtgactgtcgacggcaaggagtatgctaacgctacaatcggcgaggacggaaccgtgaccgtccctgtggaaggattagaggccggcaaccacacgattgccgtcgactttgatgacggtgagcactcccctgtgcatgaggaggaaaacatcgccattgagccatcaacggatgctaccgttgaggctacggtgaacgtgggcgagaacgagaccactgttgatgtgattgtgaaggactccacaggtgagggcataaatgggacggtaatcgtctatgtagacggcgaacccgtcgccaacactacagttggcaatgacacctcgagcgtgtccattggccagctggcccccggcgaccacacagtggacgttgaatttgtgaacccgaactatgctccaacaagctactccactcatgtgacagagtctacctcactcactaacatgacagtgaaagttgacaagaagaatatcctctatggtgagtcagacataacagccaccattgaattcacctccgaaggcaaggccctggacggtgtggttgaagtattgctcaacggggaagcacagaacgtaactgtaaccggcggaaaagcaactgttaaattcagcgacctggctgcagatcactacactgttgtgagtaacttcgctggaaacgctacatacgctccttcaagcgactcagcaaacttcgtggtggagcggaaagccaccaagtttaactacaacgacatgaataccacagcagtcaaccccaatgtggatggacgcatcggcgaatatttctacttccagctggtggaccaagacggaaaagccctggccaacaagagcgtctccatcggattcaacgggaaggtatacaaccggacaaccaacgagaccgggtgggctaagctccagatcaaccttaggatcgtgttcgggtacacctttgcaatctccttcttaggagacgacaactatacaggcgcatttaatgtcgcccttatcaacgtgagcgcccagactcccaagctatccacaagcagcaaggtgtacaaggcctctgccaagacgaagacactgacggcaaagctcctgacaagctctggaaacgtggacaaggggaagaaactaacatttaccgtgaacgggaaatcctactctgccacaaccaacgataaaggtgtggcatctgtgaaggtcagcatctcccagaagggaacatacagttttaccgtcaagaacgccaaggacaatacatatgcctctgtgtctaagactgcgaagctcgtgattaaa

SEQ ID NO: 16767 - DNA, 6678 bp, synthetic construct
  source 1..6678: mol_type = other DNA
aattacagatatctctctactcgtctgaataatctgatcataaaggctgaggacggcgccgaagtaaatgtggatctcaggggaatgaatcaaaacagtttgtattggactttctacggggacaatgtaacggtgagcggcattaactttatgaatgccaacatgacatcttacaaccttaacaactatcacgctgtgctaaaatttatcaactcatctaattctcgggtggaagattgtagtttcagcaatttgaaatcctatggaatcctggcaggaaacagtactgacgttgtcatctccaattgtaatttcacaaacggcagttctcggatgttcagtatcaccaatagcagtgtcacggtggaggacagtatcatgaagaacttctcgaccagctacattcgcaactccaccttcacgatggtgaatagcaccgtgacagatttcaatgacgacgacatctttaatttcgcaaacaccgatttggatattagggacaatacattcaagaacctgacattcccaaacaagaccaactttcagcgttttggagtgttctatgcctgggatgataatgccggcattagttataatttcatcaacaacacctttgccaatttcacgggcacagatgcttacatgatctatcggtcagcatcctcgtcagtcaaaccaatgtgcaaggtgaacttcacagacaacaatgtgtccaacgtctctgttggcgtgaatatatactacggaaacatcactgtggagaataacagcttcgatcacatgagtccggccaatactctccggttcagctattcaaacatcgacatcagagacaacaactttacagattctaactctacccacgtttactcagataggtgcaacggtacaattgagtacaacaatttcattaacaactccgccctgcctgtttcagctgagtgggggaatctgaatatttcctttaacaacttcacggacaacaagggcaatttctctgcaggggccatccaatctactggagtggtgaacatctttaacaatactttctgtaacaattccgctcgcgttggtgctgtgaacgttgccagcattagtagtaataaaaccatttacaataacacatttgtcaacaacacaggggttagcgggaccctgtacgtcaatgggaatgcaacagttcacgacaaccggttcatagacaataatgtgagcgagaacgggggagccatctatgccgcctacgataatagctataataactattataatatctctgctaatatcactgacaacatcttcgatggaaatattgctaataagggtggtgccatctactatgaacaatataacagcgcttatggcctggataacttggccaacaacacatttgtcaacaacaaagccgagtacggtggggcaatctattcaaataagacagtgaacgtcactatctcagagaacgagtttgtcaataacagtgcaacaattgggggggctatctttttagacaactatacctcggcctttaacactggaacaaacattactctaaacaatttcacaaacaacagcgcacagagtgcgggggctgtagtggtttatgggaacaacaccaatgttatcggcaacaactttgtgggaaacaatgcgacacgctatggggggggtgccctggtgactgatggtgcaaacggactcatttacaacaacacctttgaaaacaacaccgcattcctatatgccggggccatcggaacaaacaactctaagatcatcaacaacaccttcactaacaacaacgcttatcaggctggggccattttaacaatcaattccacgatacacaataacacattcagtggcaatgacgcgacaagagcgcccagtgtgggctacatagacaactacaactacactgtgtcctcttactacgtgtactactgtagtagtgaagactgcagcgggtgcactgcgtgcgaatcctgcacaagcacaatcatcgaccctataaccggagcggagatcaaggtaatcaactgctctaacggggatgtgcccgagtgcatttgtgaagattccgtggcaacactgtataacattagcctactgtacaataatgaaggtctcaatcttgatgaggatgtgtatgtgtacgatgagagcaccatccttcgcgtggctctcaacaataatgatatgtacttcctatacgaaaacgcaagcattccaaacgccagcgagtatcactactgggcctactgcattgaacagaacaactctaagccctggcagtggaacggaactacgggtgttcttgtggatgacttgtactttgtaagaaacagcctggacggctcgtatgttggggattacattaaggtgctcgtctcctacttctactttaacctggacgaggatgtctataacctgaaggattatgtatacgtatttaccgacacggactatcgggctaacacagacagggtaattcgacgagtgattaaccttacagaaagagaggacacatctctcgtaaacggcaataactggatcaacggagtttacaactgtctgtcattccatagctttatcatgcccaccacacgacagaacctgattctcatcaattcatgtatggctatgcagactccagacttcaatcctcagaaaatagccaacaaggagaatgtcggcaccggggacattgttaactacaccgtcactgtgtacaacaacgggactgtgtccctgcacaatgtgactgtgaccgaaaggcctaacagcatgctcacctatctaagcttcactgatttccgcaatcaagggtgggtgcagaccggtgagatgacttgggtcctgaataggcctctgaaggtccatgagacggggacattcaatataaactttagggtcaacaacgtcacctatctcactaatatcacaaactacattgacgtaggctgtgatgaggtttcaaacaaatctgcctttacccggaccgaaaccaaatggccacgcatacaggtgcagaagatcactctggaccagaatgtgacgccaggctcaactgtaagattcttgcttctggttaagaatatcgggacccttgaagcaagcaacatcactctggtggacaattttaatagaaatgaactggagtacgaatatagatgggatagctataaaggtaactggtctggaggacacggatgggggggatccagctcgtcttggcatgtcgacacactctacttgaaccaggtcctctatccggggcaggaggccggagtgattatctacttcaaagtccccaacaatgtgaccgtggggtctgcttataattcagtaaatgcttaccgcaacggcacctcggaggggtattcctccaattacacaattatacaacggccttacttttccatctggaaaaccctggttagctcaaaaacttcaaccataggagaggaggtggtgttccagatcaacgtacagaataccgggtatgtgaatctgacgggtgtgtatgtagaagacatcctgccaataggcctgaaatatctgaggttctacaatacagataaccataactggacccattttgtagacgaggatggaaaacatagattcctactccagaacacgcttcctacctactactccgacagtcagaattacgtggcccgactgtatatcgtctgcaacgccacagaatatggtaattggtacaacctggctacaggctacaccgaacagacaaataagagtacctcgcaggcaaatgtgacaataattccctttggggtgtcaattgagaaagtcagcaataatccaatatcacaggttggagaccaggtctcctttaccattagggtgaggaacacagggatatacaacctgacggatgtctatgtaaatgaaacaaggaactcctacatggtcttcgatcactttgtggacaattccggcaagtggattctgaatgagtcttatgccacttcaggcgtgccctcctggaattataatggtacgtttgaagtgggagccgtgagcgagtttgacgttttctataatgttactaatattaattactacggaaacataacaaataccgcttacgtctcttccaaccaaactaccaacaggtctgtgtccaatcagaccgctgcctacaatattaaggtgcgtaaaatcagcaacaatgctaccgcaagggtgggagatcaggtttcgttcactatccagatatcacgggacggctactcttgggagagtccgttctcattgtatggcattcatgtgaaagacctggtgcccgatggcttggtgtttgaccacgctgacaacagttactattggatctacaatgaaagcgacgagacatggtactatcgatctgggctgacagcaggcagaaccatcagccttaccttgtactttaatgtgaccaaggcagccaacataaccaatgtggccatcgtcggggtcaataacagtacagtgaaaactgccaataatacgacaaacagtatctaccacaacttgcaggtggagaaggtcactttaaacgaaaccgtgtacccaggaaatatcacagaattcctcgttcgggtgaacaacaccggtgacaataacctcacaaacgtgttcgtgaaagagaacatccccaacggactggtgtactatgattatattaataagacgggcaaatggaattacacggaggatgacgacggacctatatggctctatgatggcatccttgcgccaggagccttcggtgaattcattatacgattcaatacaaccgtacctggcatctttgtcaacaatgtcgtagcaggcagcaacgagacttccaataagtccactgagaattccaccaaagtcttgggtccaatcatctctgttggaaagatcacgctcaacaagaccgtatacattggagagctaaccgagtttagaattaaagtctctaatgatggggactgtaatttatctggcgtatatgtggtggaatacatcccagatggcctgaagttcgttgagtttaaagatgaaagtggtctttggacttacaatgagtccagccgtacattctattacaacggaattttagaacgggatgactccctggagtttgtcgttgtgtttaacgcaacaagagcaggcaactttaccaatgtggtgcatgcaggctctaacgtgactaacgaatcagttgcaaacaacactactgaagccctcgatgtaaggatggacatccaaaaggtcaccttgaacgagaccgtgttcactggtcaggagaccggctttgtcattgtcgtgtccaacaccggacttaaggacctcactgatgtccgcctgaaggaaatttatcccgatggcttagtgtactcacgcttcattgacgattcaggcaagtggtttaaccgcggtgattactggatctataatggtgttttagctgtgggagaaagcactaacttcacggttatcttcaacaccaccaagagcggcacattcaacaacacaataatcgtaagcagcaatgaaacaggtcctaagaacacttcaaataccaccaaggtagttgtggccaatgtgaccgttgcgaagatcacactgaatgagactgtcatgagcggcgagcaaaccagcttcgacatcgtggtcaccaacgacggaatctataacctcactggtgttgtcgtgaccgacgccttccccgaaggcttggcctacagcggcttcgtggacgcctccggcaagtggatctttgatgattccaaaggcaatgcttggatttacaacggcacgctggctcctggtgagtccgcaagttttacagttgtctttgacacggatgaagtcggtgagttcactaacatagtcaaggtgtccaccaaccaaacccaggataagaacgcgtccaatatcaccaaggtgatcaagctcattccaaatgtcgccatccaaaaggtcaccctgaaccggacagtctacagcggagagcaaaccagtttcgagatcatcgtgcgaaataatggggagatgaaccttactgccgtgacagtgactgacgccttccccgaaggcctggcttacagcggcttcgttgatgcttctggcaagtggatatttgatgatgctaagggcaatgcttggatttatgacggcattctggcgccgggtgagtctgcaagctttacagtggtctttgacaccaatcagacaggcaactttaccaacattgtaacagtaagtagcaaccagacaaaagagaaaaacgcatccaatatcactgaagtgatcattaagtcggtgcctggcattgagattataaaaatcacaatcaacagaactgtctactccggggagcagacgtcatttgacattgttgtgagtaatgacgggaacgtcaatttatccaatgtgactgtcatcgacagcttccctgaaggcctgacctacagcaatttcattgacgacactggaaaatggtttaacataggcaataagtggatttataacggaattctacttcccggtgagtctgctggtttcagaatcgtctttgacaccaataagtctggaaacttcactaaccacgtgaaagtcacaagcaatgagactggagagaaaaactcatccaatgttaccgaagtgatctttgct

SEQ ID NO: 16768 - DNA, 6927 bp, synthetic construct
  source 1..6927: mol_type = other DNA
atctttattggtgaagggacttatgttgaatccaacctcacaatcagcaaggacctgaacatcactgcactgggagaggtgatctgggacgcgaatggtcagagggcattctccatgtctacagggagtgtgtccatttcaaacatcacattcataaatggtaactacacccgcaatgggcacttgatctactgtgccggggacagtctcaagttcgatgagtgtaagttcctgagcaacggtggaaatgtaacgggtaccaacggagtcatctatgtggaactggccagtgcaaacttcaacaactgttactttgaaaacaacaccgcagggactggaacaagctatgggttgatctccgctaaggattcagtgattatagtggatggctgtacatttgttaacaactttaataagaacggctgtatttatgtaagcggatctaatattgggtccatggccgtcataaataataccaaattcattggaaacaatgctacctctgccagcggcggttcggggggcgctatctatgccagcgggagtatggcttaccagtactctaacgggactgtaaggccgggtgctcagtctgctgtctatgttattgactgcgactttatcaataacactgctttcggcggtaaatactacaacgctgaaggtggcgctatctttgtgaatgcaaatgccacattgtatgcatcgaattcaagattcatcgataatacggctcttgattatgaggagactaataagtcagggcgtggaggcgctattgcggccacaacagggaatgtccagatttcaaattgcatattccaaggcaacactgcgaacaatgggtctgtgatcgccatgaagtttgccaacaaagaccttacaactgtgaatgtcttgagcataagcaactcggtgatcatgggcccgggcgaaaaactgattgtctctgacttcactaatggatctctggttgccaacaataactggtgggcagcgaatgaaaacccatctgatagggtatccgaaggaatcaccgtggacagttgggtcatcctaactgcagatccaagtgagatcaccggaacccttgacgagatcataccaatcgtggccaacttccggcacaccaacagcactgacggaactatcggtgatctggaaggagaattcccagagctagaagttttcggcatgactttagatgagggggagattaccgagtccaacctcacggtagacaatgtcgctaccctttactacaccccagaagagactggtgaaaccacggtgtatgcgatctcaggcaatgcaatggtgccaatcaaagttaccataaccgacacgccccagcctgtggccgatgttatctatgtgagtccctccggtgctgataccaatgccgggacatatgaggcgcccgtggcaaccatcgcacacgcagtggagctggccggggccgaaggtgcttcagggttagtcgtcattgaggaggggatctataacgagaacggcatcgtgataaactctgctataccgattaccatcaccgggaacggaactgtgataatccgcggaaacaaccacgtcgttaatggaaacggagccggccgctttggcgatgtaagcgagtccacaagcataataattgtcaacacaacggaagccgttgtgattgcaaacattgcttttgaagacaacattgccgctaacgggggggcgatactcattgcaggaaccagcagttccaacctgttcgatgctgacgtactggttgagaactgtagtttcaataacttgcagggacggaatggcggtgctatctatgcctactacgccattggcaatctaactgtcgccaattgcgaattcacaaacatcaacgccacttgggccgccctgtgcgcatatcaggctgcctatggcgaagggctcacggtcgagataaaggatagtagctttacaaacaactctgccaacaatgctcccgccctgtacttgcaggcaactaatgtggtgataaaagattccaactttacagacaacaatgccacctaccacccgggtgctatctacctgcagaacactaccgcgacaatcgacaattgtatagttgcaaacaactctgctaaatacgataaggcagccattgcaatccatggcggcaatatccagtacaacccagtgattgttaaaccatctgaggtgacaattacaaactctattattgaaaataacatcgggagggacaaggccgcgccggccatctacttggagaactccatcctgaacatgtcgtactcttcggtcgtcaacgaaatcaacattaacaataccgtgactgccacctatggagacgagaaacccggacttgtgttgatcaacaacaactggtggggaaccaacgaccccagcaccaccatattcgggacaaacatcaccatggacaattgggtcatcatgaatgtcgaggcaaacgctactgaaatcctggctggagaggaggtgaaactgacggtggactttaaccatgtaaacacgaccgccggtgagatcgaagaattgaccgggggagtgattccccgagagtcctacagtgtagctctgtctgtagataatggtactgtggcccccgagacattaaccattgctaacggcgccacaggcgaggccattttcactgcagctaatgctaatgcacttataactgtcacaagcgaaaatgccgtggaaaccatattgatcaatgttggagaacagcccgtgccattcacgggcgttgtatatgtctccaaggatggtgatgacgctaatgagggttctgaagatgagcctgtggcatccctggcccgagctatcgaaatcgctacagccgaggaaggatctgggcaaatcatcattaaggaaggcacatacatcgtggacggatacaatatcaccaaagacttgaccattacgggggagggagatgtgatcctcgatgctcagaaccaaggcaacagattattcaatatggcctatggtaccacggtgtccaatttcgagctgcacaatctcgtgctggctaatgtaacggccatgtatggcgcagttgtttacagttatgccgctaatgcagtcctggacaacattacagtggccggcatcaatcatgagatggctaggctcatttcaaactatgggaatctcacaattaaggactctgtgtttgcaaacaacactgtcagcggcataatcacccactcgggaaacaataatctgaatattgtcaatacaatatttgaaggcaacaatgtgacatatgattcatctatcatgggggtggtttatgtttcatcaggcagaggcaacataacaatcgaggactccaaattttatgacaacctggtccgccagtccacagtacgcgggtacaccgacaccaacattacagtcaaggggacggaattcattaacaatactgcagacaactctccatattactgctctggcggagctatttttgcccaggctaatctggacgtgacagagtccatattcatcaataacaatgctaggcgagagggaggcgccatttatatcggaatcaatggtgtggccaacatcaccaaatccgagttcatcaataacacaatctatgataatgagtactatggagacgcaatctacaccaagggtacaactgccatcaattactgcatattcttgacaaatggcacaagatatgcagtgtacaatggcggatccaaagaggtcaatgcccaatacaactggtggggcactaacgacgatcctcagggatttgcctactcggccgatgcatctaactggattattatgactgtgaccgctccaagcacgcaggatattcaggcaggagacgaatatgaactgacggtggacttcaaccattacacggacggcagtgacattttggagctgccagatagcctagcgcaagaactcactgtggaattcacttctaccacaggcacatttgacaatcctgtagtaactaccgaaaatcaggtggccacggcaaagtacacggtggtggcaggggaaaatagtatcacagtcaaatccaccgacgctgtatggaacaccagtttcactgcgggagagaaggccaaggcgaagatgaatgtttcaatggagaacaataccattatcgtcaccctcaccgatgaggagggagccccgattgcaggcaaaaccattagtgtgctcattaacgaagacacactgtccaatgaaaccaattcaagcggtatcgccgccatttcacttggcaccctggacgctggcacctatccagccacaatcagcctggccgactccgagtatcaagctccagagctcactgtgtttgtgctggtggaagagactctggtggacaatcctataggggcagtcatcgaactggccctggcggaaaatggcacttccatcgaggtgaccctcaaggacattaacggtcagcccattggcgacacgatcgtgagatattacattggaagcactgatggagctctccttcctatcgacgcaaacgggaaaggatcctttgacattgacaatacagtcaatcagaccatcaaggtcagctacaccaaggaaggcacagaatggtcctcatattatgactttatcgtgaacaatgaggtaactcctgttcctgttgccaataacgccaagttcgatgtcattgtgcgtgaggacagcattgatgtattcctgtacaacgataacctggacgatttcgagggcgctaagattatggtgaccatcggtgaggaggatccagttgaatatatcgctggagagaacggaaatataaccatccccatcaatggcgataccactgtggagctgtcctacactgatgagaacggagccaccgtctaccacaccgttaaggtttccaccagtggggtggacccctctgccgaaattgaaattatcgtcgagtctcataacgacacttctatcgaggtcagcgtgaccgttgatggggatgatgtcagtgatggtgagatcacctattacatcggggatgatgacgatggcaccgtggtgcctattgaagatggaatcgctatcataccattcgacaatactgtaaatcagaccatcgaaatcacctactcagacggggacgccacagagagtgtatactacacgatagtggccttcacgcacgaggtgcctgtggagccccccgtggcgaatggcagctttgatgtggagacaacggatgatgctatcgtggcgaccctcgtggactctgacggtaaacctattgctgatgcaactgtgtcggctatagtcaatggcgaggagcagaatttcacaaccgatgcggatgggaagctaagcgtgccgattgacggcaatgcaactgtggagcttagctacacagatcccgaaaacggggctgtcctgaaatatgtcaccgatgtggtcactaaagaggttcccattgaggttcctgtggtggctaacggcactatgagtgtagaaacaaccgatgatgcggtggaggccaccctggttgacagtgacggcaaccccattgagaatgctacggtcaccgctgtcatcgacggtgaggagcaaaattttacaactgatgccgatggtaaggtatccattcctgtcggtgagaacgctaccgtggagctttcatacactgaccctgagaacggtgccgttgtgaaatacagtaccaaagtcgtcactaaagaggtggaggttcctgtggacgtgcccgttgtggcgaacggcacactgaccgtggaaacaactgacgacgctattgtcgctacactggttgacagcgacggcaagccaattgctaacgccactatcatcgcagtggtcgatggcgaggaaatggaaatacctaccgacgaggacggtaaatgcagcgttcttatcacaggaaacaacaccgtggagttcagctatacagatcctgcaaacaacgccacagtttcatactccactaaggtggtcactgaggtcgaagaagtgatcgtgcctgttccagtcgtggccaacgctacaatctccttaagcactgaggacggcagctcaatcgttgcgaccctaaaggaccttgacggcaacgccatagcaaacgctacacttgatgctaatgtcaatggcgaagagactaagttaactacagatgcaaacggaatagccaccattcctgtctctgcaaacacaacagcagtggtctcctacacagatagcaacaaggctactgtaaccagctcaatgagcctaacagtgatcgagaccatcgtcgaaatcaacaagacaatcgaggtgcccccagttagaaacgcctctcagatcgtgtgcgaagacatgaacacaattgcagttgccaaagatgacggccggatcggagagtacttctacgtaaagctagtggacgcaaacggcaatgcactggtcaacaagtccgtgcagatcggattcaacggccgggtatacaaccggacaactaatgaaacaggggatgtgaaactccaaatcaacctcgcctacaaagggacctacacatttgccatcgcctacctcggcgatgacaactacaacggttcatttgtcgtgtcaaagatcacagtaaaacagcaaagtcctaagattaccacaacttccaagacgtataaggccagcgccaaaacaaaagcactcaccgccacctttaagacagccaatggaaacctaatagctgacaagaccattaagtttactgtgaacgggaagacatactctggcaagaccaatgccaagggggtggcaactgtgaaagtaagcctcaacactaagggaacgtacagctttacagcgaaatatgccggcgacgacacctttaaggcaacgagtgccagcggtaagttaactattaag

SEQ ID NO: 16769 - protein, 68 aa, synthetic construct
SGDPDGLEKSAEDANVGEDVEAPVMEAPFPDYTYEPLEKIGEIGVLILGALITLIVAWGIGYALKRSE

SEQ ID NO: 16770 - protein, 177 aa, synthetic construct
FNNTVNIYLDGENVSVETQTFEDIDSNSLNKDICSYTLNVMNNTTSDVETLKNGVEKLCYQHGLEDAEINIDSSLGHDQIPIIVHVDGTSMLPTLQNGQTVLVNKTHDFEVGDIVVAESKEYGGIIKRVEKIDENKVHLISDNKNISYEYIDGALYQIKGITTWVDISDVNGVVIDY

SEQ ID NO: 16771 - protein, 218 aa, synthetic construct
ADPLTDNQLNPTIFYLDFNHGALNDGFKKEFDLFEYVPTFDSVDLYNDGENVSVSFYSLNPTIDVDNLNDEIIDYTFEVMEDPKANITTLKDGIRNICSEYGADDVKINVDSVIGEDEIPVIFTTEGDSMLPTIKSGDKVLVNKSHNIHVGNLVSANSSEYGPICKRVADIDGDSVYLVSDNKKVTREYYDDYYVEYKGITTWVNIDDIDGVIIDIMN

SEQ ID NO: 16772 - protein, 241 aa, synthetic construct
SVGTSNGDLNGQDVQLAAAASLKNVYDEKLIPMFEEKYPGVKVTPTYASSGDLQKQIENGLKADVFMSAGNKQMDALINESYVDNDSNVKFLENKLVLIVSADSNVNISSFEDLKNVNGTIAIGDPESVPAGQYANESLHNLGIWDDVESKLSLGTDVTAVLNQVAQGSADCGLVYTTDAKSSDEVKVICEAPEDSLKDIVYPVAPIKDSEHADAANKFMEFLQTPEAQSVFEDYGFTIHE

SEQ ID NO: 16773 - protein, 252 aa, synthetic construct
CSAGFLDFLGGDNATDDSLNGKEVNLAAAASLKNVYDDELIPMFEAKYPGVKVTPTYASSGDLQTQIENGLETDVFMSASNKQMNALADEGLIDNDTNLQFLENKVVLIVPKDSDLNITSFDDLKDVKGTIAIGDPESVPAGQYAKEALTNLGIWDAVESKFSLGTDVTAVLNQVAQGSAECGIVYATDAKSNDDVKVVCEAPENSLNTSVIYPVAMIKDAKDADAAKAFLEFLQTQEAKDKFVEYGFTIHE

SEQ ID NO: 16774 - protein, 261 aa, synthetic construct
NDLSDSNVSSDLTVDSDSISSDDTGSSDTSSDDSNQDDVSQDKTNDKKLSDSQSDSSKDTQDTDDNNTDNGSDKCNLIITKKGNEKVKVGDTVEWTIEVKNSLNTAENISVDEFLPQNFEFKSAKASKGNYAVEIANWDIGNLKENESATLVIKAQALKAGNFTNVANLTTDSDNINGKVLSAKADVEVLSENKKNETPVGPKKNKDNNSTVKKIHKLIKNQTNNTNMTPIDFKKSGNSLFAVIIAALAVLGIFLGRRRIN

SEQ ID NO: 16775 - protein, 342 aa, synthetic construct
SPSSISTDGNTTITDMANRTVNISSSVDRVVATSPPMTTIVYMLAPEKLVGVNFQWTDEELKYVPDQYKDKFPVIGGWFGSQDGNYEEFIASEPNLVIEGIDEGMGVDLSTVEERQEKFGSLPVVAVTDNTNVTKIDNTIEFLGKLLGAEDKANELIAFNDKYLSQVQSTASSIPDSEKKSVYYASGEDGLSTYASGASHGQLISLVGGKNVADTEVKDSGSELTVSIEQVMSWNPDVIIATDEDFYNKVYNDSKWASVKAVKDHRVYLSPQSPFKWFDRPPGANIIIGVPWTAKVIYPDKYSNIDMVGATKEFYSNFYHYGLSDEQAKEILTSSGLKGSDL

SEQ ID NO: 16776 - protein, 343 aa, synthetic construct
LTPSSVETEGSKNITDMLNRTVEVPNGVNNVIATSPPMTTVLYMLSPEKLKAVNFQWTEDELKYVPSEYANLPVVGGWYGTQDGSYEEFIAAEPDIVIESIDEGGDGDAFTVQERQDKFGKIPVLAVKDTTNVEKIGDSISFMGEVIGTEDKANQLNEFNTKYLDIVHDKSSKLVDSNKKTVYYAASSDGLQTYPSGASHGQLIDLIGGKNVADSLNQGNTTSGVQVSIEQVIKLDPDVIITNDMHFYNKVYNDSSWAHLKAVKNKKVYVSPQSPFKWFDKPVGANMIIGVPWTAKVIYPEDYKDINMVDVTKEFYSNFYHFDLNDNQAKEILLDSGLKESNL

SEQ ID NO: 16777 - protein, 352 aa, synthetic construct
SENIVIDESSDSNLVIDHAKDNYLFNGPIKDNYLSSSSISDNYLSKGVLDDSYLSRSDLDDSYLSMDDGKGSIDLTNHNQLSNSDDKQLKTSNLEDEKQLESVNKGDKLLKDSNDNVDLFINMDVKTSLTNKQYNRAGSEVPWIITVSSLNGTSYNTQVRDVLSENLQYLSHNATMGTFDPENGIWTVGDLESSKNASLTILTRLKRDGTYINKAYATTDSNDVNLLNNFLIISIRTGSSKITSNITETSDEREGIQHNVHYASMVDTDFIYRYEEDSSEDDGGNEEGQSEGNSHTKTRSLGNKLKLFNAQNIDYHSLSKNIGGALGFGYNSNGGFLNSKDIYEALFVYDYT

SEQ ID NO: 16778 - protein, 513 aa, synthetic construct
GGGTTERGPGEIVVAAYSHGGEPEAGFDPIAGWNYYAEPLIQSTLLKMTPNGTYAKDLATDYEISDDYKTYTVDLRKDVKFTDGSDLTAEDVAFTYNAAKESGASLDLSALDKAEAQGDYKVKFTLNKSDSTFLDKMAYIGIVPSDSYNNESYGENPIGSGPYKFVQWDKGQQVILEKNPDYYGKQPEIEKITILFAQNEAAFNLAKNGEADIVAVPLEYGKEKLDGYTMYLQDTIDVRGVSLPSVPDTGELSPDDNYTIGNNVTCDIAIRKALNYGINRTALAEGALNGLGYPSYDGIAHQLPWANKEAAIEDGDVAYANKTLEEAGWVDSDGDGIREKNGTKASFKIYYSASAPERQALAVGAAEQAKQFGIEIEPVGAEWDEIYPNEFSQGVLWGYGSTDPSDMYGEYYSSSDFNPARVNNSAVDKHMDDAFAESREDSYKDWSAVSWDGSTGISPKGDANWLWLGEIKYGYFVNDRVDISNDTALLQPHGGDLFSNVYDWTMTNATAEK

SEQ ID NO: 16779 - protein, 514 aa, synthetic construct
GSSTERADNELIVAAYSHGGEPEAGFDPILGWNYYSEPLIQSTLLKMTRGMKYENDLAKSWEANSDFTEYTVKIRDDVKFTDNTTLDAEDVAFTYNEAKKSGASLDLSSMENATAVDKQTIKFELNRPDSTFVDKFAYIGIVPSDSYNNETYGANPIGSGPFKFVQWDKGQQVILEKNPDYYGKEIKFDKLTILFEQNEAAFNAAKNKEVDIAAVPLSYANETVDGYNMHLMDTIDVRGLSLPVQNNTGKLSEDGNPIGNNITADKSIREALNYGVNRTAICKGALNGIGVPNYDGIAHLLPWANNESAIDDGDVDKAKDILEKGGWKDTDGDGIVEKDGKKASINVYYSSNAPERQAIAVTIAEEAKEFGIEVNATGSNWDEMDKIKNTDPVVWGFGSTDPSTMWSEYYSDQATVGYNNPALINNSAVDKHIDNAMKSDRESSYAEWSAVSWDGQTGISPKGDAAWLWVGEIKYGYFVDESLDISNNTELIQPHGGDIFGNIYDWSRVSSIEK

SEQ ID NO: 16780 - protein, 515 aa, synthetic construct
ADIIADNQDSISSNDNSINEIATEDISKDINDKSLSDGVSTGGNNWIVKPSTDGKSDANSIQKAINLDNTKPGDSLLLTDKNFTLEKSVSLNKDLTINGGNIYNQNNLTDLFIIDPKSEGGPKNITITNVTFYVNGNENIVLANGENYGTTYIDLANIKISNCTILPINPDSNINDTVLLNIKSDRTVGQTGQSTGFVLVSGNKLNGINTLKNNDYVLKDDFVIQKADPILNTALICPNMTITTYDKNTNDTPSYYEVKLIDQNVNPVINRTIQIGFNGKIYDRTSDENGIAKVKLTLAYTSVYTFAVYFLGDESYASAFDVSTVTIIKKNATITPKTVSYNVNAKTKTLTATLKDKNNKALANKKVTFTVNGKTYTATTNSKGVASAKISLSKKGTYTFTAQVLQGTISIIQFPKKGKLTLNPLSTNLTVKKYTFKKAATKKIQVTLKSGKTVLKSKKLTIKVNGKTYSGKTNTKGIATITIKLTKKGTYTYTANFAGDNTYKAISKSQKVVIK

SEQ ID NO: 16781 - protein, 520 aa, synthetic construct
FMSGGNTSTRADNELVVSAFVHGSEPETGYDPMYGWGDRGEPLIQSTLMKMNRNMTYDNDLATSWSSNNNFTEYTVNIRDGVKFSDNTTLDAEDVAFSYNQAKSTGNTIDLSSLDNASAVNKTTIKFKLNKPDSTFTDKLLHVGIVPSDSYDNNTYGSNPIGSGPFKLAQWDKGQQVIFEKNPNYYGKQPKFDKLTISFQKNEASFNAAKNHELDIAAVPLSYANETIDGYHSFLSESNDVRGISLPMKNNTGETNEDGIALGNNVTADKSIRLALNYGINREDICKGALNGAGVPNYDGIAHFLPWYNNDSTIKDADIDKAKDFLKKGGWKDTDGDGIVEKDGKKASFNLYYSSDAPERQAIAVAVSEQAKEFGIEINATGSNWDEIDKIKFSEPVVWGFGSTDPYVMYGEYYSNQAGIGYNNPSLVNNSAVDSHIDKAMSEPREQSYADWSAVSWDGQTGISPKGDAAWLWISEIKYTYFVDDSLDISKDTFKLQPHGGDLFGNIYDWTRISPINATN

SEQ ID NO: 16782 - protein, 520 aa, synthetic construct
SMLGTSNDDDPRHIVVTIPGQTGEPEAGFNPLNGWGCGHMEFNPLVQSTLLKSDKDGNFVNDLATGYNISSDGLKWTVGIRDDVKFSNNKSLTAKDVAFTFNEAKSSNSQLDMSNLKEAKALDNTTVEFTLNSPKSTFNYDLRYVGIVSKEDYNNETYGQQPIGSGPYVLKQWDKGQQAIFEINDNYYGDKPYFTQITMLFPKEDSAAMQIAKSGQADVVQVPISGLNETVEGYELVEFFSPRAQGITLPYQNATGEKTTGGNDVGNNVTGDVAIRQALNVGINREEIVDSVYKGHALVETSGIDHQKYNNPNAIIKDNNPKAAKKILDDAGWVDADGDGIREKNGTPATFTLLYSSDDQARQAIATVVSEQAKDLGINIELEGTDWDTIYSRMYKDPAVFQQSSDNPYKTTYLQYHSKDNLSEDNYMNPNGYENSKVDAILDAALRETDLNASYKLWGDAANTGSGYGFGPNEDASWLWIADFDYCYFVKKDIDMGTKPTMGQDYMQNICEWKHTSTTE

SEQ ID NO: 16783 - protein, 539 aa, synthetic construct; identical to SEQ ID NO: 6142

SEQ ID NO: 16784 - protein, 638 aa, synthetic construct
NDLDSNSVNQDNYISDVDSFDGSNSVLSSSNLDSSIDKDNYLNLDSNNNLNLDSDKNSVSGSDLNLNNADLINSVSGSDLNLNNADLINNSTTNDSSNSNNSNNLENLTNLDDSKGASNQKPQKYLIPNDSSIGSAYIQKIIDNAAPGSTIQFTGSFYKNIYLKIDKALNIISKSGTVINSSYRLPVFTISRGGSGTNISGFTANLANSFVEASDVSDISISKNKIFTKRKAIVLENVFNSKIVRNSFLRFETAIDISKSGGLTISNNNITPDNGYNVGISLKDIYRDKVSILNNNITGHDRRIESTGIYFGPNAKNVLIEGNIIDEWYTGVDFPNSVNNVSILNNTLNHNGDGVIINGWINNFTFNKNVVTNTGRVGVLFDYDFYGTKGDFTLEKNFFTQSGQLDLRNTGDQAVTIGENFASRRCVRVAMKNGFSIKTRQNGNGYYFSIVDKNSRGVSGLPNFSATISINGVSYNVNFINSVAYVEVDGASGENDEVLLDVGEDKRKLSDWGETQNLSSSEMEYYKKIYDDLIKSMVEETNNDNQDMKKVEDKNGTGSTPSGGNGGGDSGISDGRSSVSSNGDSSPASAGTSNVAASSASSSAGPSAAQADTPESSTVKSLSLDEETFRVAGVGGLV

SEQ ID NO: 16785 - protein, 662 aa, synthetic construct
ADADVTYINDAADVDDVADEKVAPLTASADAQDIQTKLDNAKPGDTIELENKTYDVDTTFNVTKQVTIKGQDTVIKASGASQGGSGALFIANEAGTAFEGITFINTDGHKNYGEQVSGYAIQLAIENGTVDNCKFIDWSSGVYGKGASFCSITNSYFNGSSEQVTNGGKKEYGTKAINLMGSHDITVTGCTFEGQVLDAISIASNSGNNIMTDNTFIDNCYAIYFGGASTQGCVIANNSFIRCGYCVDDKGNVIFKDLPIISTQKAANGYIIADNTIEANEGSIFMKAESGNTAHGYPSKIGDINITGNTITATAGANPEGITFMYILSNSGPLNPYAPIAIVNNNLDAGITPVTVWYADWDNENGTVIPAADKAVTSINIAEIAAADGTVTVELVDVNGAPQAGQTLSYKIDDGNATEIETDENGKAVINVPIDENATAQTVAVEFAGTNDLAASSAQVSFKNTATKRTATQINANNMSVVTLAPNTGDTNDNYFNATLLDAEGNPLVNKEVKIGFNGKEYTKTTNENGVAQLKINLGYKGGYTFAVAFLGDDEYEASFGVYLINVAAQTPKLTTKAATYKASAKTKSISATFKTEQGSVIANKKISFTVNGKTYTGTTNSKGVATVKVSINKKGTYSFTAKYAGDNTYKAVSASAKLTIK

SEQ ID NO: 16786 - protein, 689 aa, synthetic construct
LSNSNTDSSDNASDDASGSEIVSGINEELESNNLLTEDLSVDDVILQTSFYTSYAVKSAKSPTVLTFKNSTVVKGDKLYIYLKDSSNHGISGEKVIFKFSNSSYTRTTDSNGMAALDIKLNPNKYAFSAIYDGSDNYSASRKDFTLTVAKVNTKLTSSSSVVRGRNLYTYLKDKNNNALSNKKISITISGKTYTVTTDKNGRASLKLSLKTGTYSTKINFAGDKTYNSQSLSKKIKIYTLKTVMTIPSTSVVRGQYIYAYLKDSDGNALSGQKVVMKFDKIYFNLKTDKNGRVALKINTRLGKIPVKASFAGSTSYSASSKSVTITSYVEKTKITVENSTVKRGKYFYAYLKDSKDKGISNQKVKITLANINYTKTTDSNGKVALKIEENPGNYTIKLNFAKTNSYYASSKSLKINVLNNATAKIIAKDQTVLGEYSVRLTDMNSNPLANQTVEITAATVNRSVGSGLPITKKTVVINSDNIYNKATDSQFIKSIGEVLKSKGYKVIINSNIGPNAHCTDAMGAYSDVCIFCIFGGVDSGMFVDMAASWYQNLLKKYDNEVVLGFTHTQRNLATDTWLERAHDDDYSPKNFTGLSYPGTYLNDYDMDYVYGRTATEMANNFIKYAVNGLSIGLNNTVPCNVMEYNVTTGDNGYATITDLLPGDYAVISSYINKTAGYVADTVISIIEVK

SEQ ID NO: 16787 - protein, 776 aa, synthetic construct
SENSISSDINDNSLINEFTASNQINDNIAINDGLSKGDKSQLSESKSIYVSTNGSDDSGDGSEKSPYQSIKHAVSKADDDSIIYLSSGTYNGENNQNISIGKSLSIYGEDSTIIDGEDKAQLFIMNSSAKLSLNGLILTNAYKDGNLSDYGGAIINEGGQLTIINSTIKNSYGNYYGGAIYNNLGRLTIINSSILNNSAIQYGGAIYTLGVTNIQNSVFEKNTLTAEKGVGASIAAGGTITLNNTDFLNNHAIYSAAALLSLGNATINNCSFINQTTNYTAGAISNHGNMFINNSLFFNCRVRFYAGAILAPPSGHHVVTEVYNTIFDYNNAGNHGAVTNNFQDAEITMINCAITNNYIQKNVFYGDIALDDNATVQYCWWGQNNISSYYYSPHSNNEDPGQINASRWLMMTFTSSNGNISADEVNTLTVSIKQYFDNDTKEIYEYNEDINLPLTVKFFDDNKKTIATKTLKNGTASYNYIPVKGVNAVYAQITNEIIEIPVVQKKESNLSTSNLTKYYKNESQLEAKLTDGDNNPLSNKTISIELLGKTYNKTTNENGIVKQNIGLKPGQYTANIIFKDPEYKNKNITVQITVLKNSTSISAKNLVKYYKNSSQLTVKLLDNNKKAMKSKKVKFTIGKNTYTRTTNANGAATFNINLKVGTYNVKVSFGGDDYYKGSSKTVKVTVKTTKMQAKSTKIRKNSNFVATFKDANGKVIKNTKVKFTLNKKTYTKTTNSKGQATLKVSVKLGSYTIKSQYASTKTYGATVFNTKIKVVK

SEQ ID NO: 16788 - protein, 833 aa, synthetic construct
NDLGTVLEDNDNNGLNDLNNDDFINSDVNSDSINKEAISNLKSLNSQDESTSSDSNNSASSNSNSSVASSSNSSASSNSANSNSSTSSNSANSNSSVSSNSTNSNSSASSNSTNSNSSASSNSTNSNANTNNSSSDASKTQTIKLSSQEESALNEFLNAIKTTTKGTIVLKNDLVLNQTISLNNNITIDGRNHSISSLDVTNMFKTFAKITLKNIVFTNYHEIENLRAILNSGELTVLNCQFNGFSYLTNGSAIYNSKKLTVQGTKFNNNYVNNSGGAIYSTGTLTINNSSFNKNHAGKNGGAIYSTLNLILNQSVFSNNSANESGGALYSKGSGLNIKYSRFNNNSASLNGGALYSSSNSTVISYSNFVSNFVEAYDKASNGGAAFIYYGSKIAYSNFTSNHCKTTLTNSSQKKSIQSMGGALFYYGGNHTLSFSNFNKNSVENDGGAVRIAKNVGKFTLNKCNFTNNNASYEDGGAISLATPNITISNSIFKNNFANEDGGAIDTFSLGSYKVNVLIKNCLFNSNTAFKAAGAIYLGVNTVQSIVNSNFTSNKATVAGAFYIESISVSISNCIFSSNKADNVSKKTIYNKQGKVVSHSGGAVFVKNGSTVTIKNSLFKSNKATSGGAITNHGKMVIDKCNFTSNSATNGGALYGGGKTSTIRNSIFYKNSATKTGGALFINEGNVNMKSSMIVSNTAKSYSVYSTVSITLNNNWWGNTLSIKDKSPKTLGLTNVKVSTWLHLKIRAKTTKLAKGKTTTLTIDLRYNNNDKLVSTAFNNPLTLTVSEGTLSSKKVNLKNGKATVKFKKTNSKTAVVKVKLLGKTARCTIKTK

SEQ ID NO: 16789 - protein, 914 aa, synthetic construct
ENIITADLNSNSNELNSDFAYGDSDSEEILDEPSQKLKTGSDNSDFKDIQNLIDNAKENDVIELSGTYTGDSLIVVNKSLTLKSSSSATLDGEFLNELMAINAPNVILDNINFINANYTGLSVNNNYVTIQNCNFDGCINGELGCALIIHGNNVNVLNSNFTNNVANKSSCHHTDGAAIYLIGNDCQIDNCSFINNWGYNFETSSSGGAIWIKGNNIVINNSYFFNNSATAEVGWTFHGEEITYLADGYGGAAFLVGKNVKIINSLFDSSLSHAQGGALYYKSAYDCSIINSTFLNSFSVGEGGVIYLGQNIDGLMIDSCNFINNTADGLDGVLVKYTDLGSVLYASKFAENVVITNSSLLNNKGTSAVYFLGNNLNISNSIIENNNLSTAVIYMNGSMNDNFWSKNFDSADEFKNDCFIIRDNESQVPDTWFNLVCDGLDSLKAKGVYDYNMSFVLKDASLDNHASKISLTNNLPNYHINLKNSAKNKINPNELVIVDNQADFTYDYIESAKDSIDVYDDYNNLILSKKVLSGITYINDSGNDTKDLQDAIDSASSGSLISLSNKTYVLDTILINKDIHISGEENTTVMLSNSSDYIFKISNCSAANYSDYGIAISNINFILDNGDIVALAEAVNGSGSLSIDVASIKITDNSFTSREGVVRESITILELDSQRAVLAPTRNISISNNSLEIGMNPFDFNVKSVINGSDVRVDVGGNLASKKASQIICKDMVTKAIASNVDSRSGEYFNVSLKDSQGKPLQNKFVQIGFNGAVYNRTTNESGELRLQINLAYKGVYTFAISYLGDDECNGSFEVAKITVNPQSPILMANNAKYKVSSTKTLSASFKSMKGSPISGKTIKFTVDGKTYSGKTNSNGIASVKVSLNKKGTYKFTAKFAGDNTFAAVTKSAKVVIS

SEQ ID NO: 16790 - protein, 923 aa, synthetic construct
DISTIPNDEKVSINENDYDTNYYELPDKKLDHLESNDNQNHLEMNDKKLNDGNSNNDFNYIQELINSHKDGDSIFLEDKTYIGNGSPIIINKNLNIYGYGYKNLSDLDIKTILDGNSKSNIFIINKGIQLNLYGLSLINGNTSYEDGGAIYNNGLLSIDSCSISNNNAGGGAVYSSEGSEIEIYNSLFENNSGLLGGALDLENANAIISKSTFKGNRCNGDGGAIYNNIGKLTISNSTFSFNKGARGGVIYNNHGTLSIYDCEMFLNSASQLGGTVKNWGSCEIYNSTIKNNTADMYGGGLYTFEFKMTVNDCLIENNYADEGGGLFADADSRLIVINSTIINNNAKIGGGIDAKQAYLTVNNSSIINNNAKSNGGGIYADKHPAEIHNTNIKDNNGNSGGGVFIGDISAKISDSTLNGNSGETGGAIFNKGKLIIEKSTLNSNEANYGGAIYNQKNLTVNKSSFDSNKAYEAAGIYNLGDFLIESSNFTKQSVSHKAGVILSVNGNIKIKDSIFKQTSGADEGGVIFTREGNIFIDSSLFLLNNALSYGAAIDNSAIMTIQNSLFSRNKAFGAGAIDNGGDLTVTNSTFTNNKVTNNGGAIDNNGKLYMSGSVLVNNTAQNYGGAIISRKDTNIEYCQILDNSAPEGDGLYDSGDYLLISNNWWGENNPNFDELLNFNIDEDFKWIEMNFTNSTPLMQKKVSNLTISLNGKDKNNNSFKLENPDKLPILKSSIQVVSEDSKIKYNLNIVNGSASTSTDMKLAKTVNAILDNEIVSLDVLENNESDDDSEDSDDSNDSNDESDNPNNSNDNSDNVTDDSDDSNKSNNPNNHQSNGNKNNDNNKNYYNKNGLRYSKMKNSLLNSIDSNLDNDYLNLKENNENNDDSNSNNKDMNYSDKKTDLNNESSNKEIDENETKLFDINYS

SEQ ID NO: 16791 - protein, 1031 aa, synthetic construct
SEDINTDIDTDYQSDSIDVSDVSLNDEQIASEDSLPNYEIANKSKDKLYDEGEEEEGGITNDDDDENYRIDGIYADYTITPSENGTIFVEGERIQIIFNFTDQDYEPVSGDWFINFYGESTDVDIYHPFEATGLTDYVVPIYLPPGDYVIFFYEGVVFDDFGGIEDEGTQLDVTFEDAEGNQLDNPEFSIRTNYNKKVYANLTIDYSVAELENLVEGDDITAKISLMDEFNNKMTEKVNLEIYRNGENYDSKKVNVVEGQNNNIIFENLQEGNYSLEVASIDSVPKYTNIITKAVNFTVKSNYDPDNYQIILNPEDEKKLVGDSYEMGVKLLNPSEEAEEGSIDLYLNGNFVKTLELNYDEDGYSHHIVEGLQLGPNNATFLYQIRDGVNVSESVNLIRYETESIIDLESSDIIIGDDAKIKASLSYLDGIVKKPINENFKLYIKNYVEDEDEVEFVYDEEFTIKGSETITLSDLEEGTYYISAVYNGKNYKYLATEEESTLEVFPKETRVDAVARTYSTEENVIVGIELADLSGKAIKGTVNVVLDNKTSYQVNTTDDIQHPVELDLGKLGYGLHNIELNYTGDDSEGWLPSYNNAEFLVIYPSFMSIEDGDVTSGSDLTVNISLTGPDDEGINGIITVRIYDNTGKYLINGDFNTTNGVKSIELKNITKDYIIYGRYYGLDTSKIEIGPSNHYLSSEAYGFIRIAEGKSEKTEYDLELTKVNDNTVIASLKDSDSKPVANAELTVKVNGVESKAKTDNNGMANISFSGNSSIKVSYTDANNTTAKASMEIIIINNVTEKIVNQTVEVPVEIEKIVYVNQTVEVPVEVEKIVYVIPNRTDTAFEYENMVTTAVASADGRTGEYFNVRLIDATGKPLAYKPIKIGFNGVVYDRTTDADGRAKLQINLGYKGDYTFAIGFLGDDNYTGAFEVAKITVKLQKPQLSTASKTYKASAKTKTLTATFKSEHGNTVSGKKISFTVNGKTYSGTTNSKGIASVNVSLSKKGTYSFTVKWAGNDQFASVTKSGKLTIK

SEQ ID NO: 16792 - protein, 1258 aa, synthetic construct
AVENDYSNADLDISNDFVLSDNSNEILIDSSGSLDDSSSALVSEGSSNGLDSYYSNDLVLNDSLSSRSSVIEDSCSIDSTTIEDKALEKSLSSNELAEGTKTYTDLLKDIKSAKNVLNLKYDYIYDSTIDKSLKKGIVLTFDEDYELTINGNGHIIDGNGIAGGFNFENGEFVINNLSFQNCKISSLILTSCDFTTNYVTFSNNYDKSSGACVYLDNSYFYSSHDNFIDNYAPSGSAIYGECSVIDVYDGLFESQKPIDWSFIYGWDETEIYIEDCLFRNTVSNYSTAVYGDYIIEISNSHFTNLFSKFTGGAIGVRNASLTVEKSEFNNVSSLRNGGVIYADMNVDEEKSSEETIIKDSSFVNSKSDFGGAVLQLGGKLKIYRSNFTENTANYYGGAIYTSNVSFYTSKSKFSNNVANEMKGSAIYFDNGDLKIENSNVLSNPSCEGAIYIYDSFYNISGSTFSNNDVAIHSFFDRTRTVKNSKTGKSTTVKSSLNNNTWGGDRNKLNNVEYPYFVSNLGQDIILNPVKINATIKDKYFNLVDLGLVTPVKDQGDSGACWAFGGAAALESAILKATGVSLDISENNIQSAGLRYSLYGKPSLTEGGYDYTALAYYLSWLGPNNSSIDEYDQFGKISPQLFSEDNYHILDVIFLDPANTSSIKDGLIKYGALSASANGADSDSNDFFNEKTYAQYCNDDEASANHIISIVGWDDNYSKNNFLITPKGNGAWIVKNSWGSDWGKNGYYYISYYDESLRSCYAVAYLLNNTLRYNKLYQYDLTNYDDFDDGDYDGVIYSNKFTSNGDDLIAAVGTYFEYEDDDYVISVYVNGKKAYQQKGTSAFVGYNTIKLNKYIAVNKGETFTVAISSSAMPYVDDTRIHLPKGSSFLTVDGEQIDLSQRGQIACIKVYTFNDTKITRDQSTYYGSDKKLAIESELEGTTISLTDSNCKSLGSAKVVDGVAQFDLVLGPGTYFYTSSYAGEKIINSFKVFSTIGGVSNKNIGYKATASFSLSFKDENGEILNNSQFTYTLDGKSKTLTTLDDGTYNISFKNLAIGTHKLSVKNLISGQVSNATIKVVSRFSGAKDISMFYFDGTCYKVRIMGNDAKAVGKGQTVTVVLNKKTYKLKTDANGYISLKIPNTLTPNGAKAKVYSIKMTYAGQSLSKKITVKQVLKTNSLTVKKKAKSFSIKVTLKGKTVLKYKVLTIKFKGKTYKVKTNAKGIATLTLKKAVINGLKKGGKYTFTVTYLKDTIKATVSVK

SEQ ID NO: 16793 - protein, 1269 aa, synthetic construct
NEDVDNGLIDSDDSILQSAEVSDSAIGSDSILQSAEVSDSTIESDSIELEDKGNVLKSSDNASFELDDKNNIGSADSELEDDYLEPKEKNVLSMDENAWFYNYIVWYDGDDGDWVSLDFVDDLKNPENITIRLNSYDTPFDGVDLAVINDYDYSITKLTTDDNGTVVYNVPYEVDELSVFVGFWYDGDFVATYGNWESYTICAVNWGTWYRDPSKRTYDFYVSVSDMDTYESPIGAQVVFTSDSNQYVGTIDENERAIIPKVSYGTYDVKVIYDGYCILNLSDSSAIEFYDDHHTDPDSLGDERIDYMYVDSSGVVYLDLCYDGSLKVPDNSTYEPYGDDNPSGGGSGNQSGGTVANGTFTSLQSLFNRAAANSTISLTRDYVYDDGFDIKGIVINKDLTINGNAHTLDALGKSRIFYVNNSTVKFNNILFANGNATLGGAIYNGSAVNCLFINNTAQDGGAIYYGSALVCDFINNSASRNGGAIYSGGAVNCSFINNSANLGGAAIYDSLFAVNSTFVGNTLASSNPTGGSATTDVSVVSFNPITTYIPSPPSMTGSIGWGGAVLDFTRPVIYTDYNETFYLLTNFTLQQDGFNNYGNVQLTGRDLVFKSLYPYSGNYSMALIISGQIFTPTYVLGENDTYEAHFKLNGLSLGLHMVYAYVDFGYPEYYSYRIGGGYMDRVAYDRTAEIIFPILINKTVEISSSNLNKYYGGTGKYTVTLTDGGNPIANANLNVSLAGKTYPLKTNANGQASMDINLTPGTYEAVCTYDGVSQRSNIIVRSTINLQNLTGIYQNAKVNATFLNAAGSPLANTKVSFRVGSKTYSATTNANGLATANVDLAAGTYDVIAINPVNNEQKTSKLTISKAKSSISLSSTSNNDKVTLTASLSPSTASGNVTFNLNNKNYTAKISSGKASQTITGLNEGNYTANAYYSGDSNLNSSSASTKVVVKIVIPTKIIYKNMTTGPVAKSDGRIGNYFCVKLVDGSNNALTGLPIKIGFNGKIYDRTTDSNGEARLQINLANADIYTFAICYLGDDDHQASFEVAKIDVNKKYPKPNSANGNSNGVPAQETISNTKLKTYIQYSNMTTKSVLKSDGRVGDYFEVKLLDNNKKAMANVPIKIGFNGKIYDRTTDSNGGAKLQINLLKPTTYTFAIAYLGDSKYQASFEVAKIVVKAQSPKLTAPKKTFKANAKTKSVSATLISERGKPMASQSLKFTINGKTYTAKTNSNGVATVNISLNKKGTYSCTVKFAGVTGANAKTTKTTIKIS

SEQ ID NO: 16794 - protein, 1435 aa, synthetic construct
LYISEIEINQNIILNTEGNKIYLNNSPKSNIHDNWFGNTLLNYDEVPYEGCTNWIFLNGESNQVSLENPISFEITFTLSSFNKNTKKISNYDDRKLPFNLTAHAEHGILNPNSNLLGKTTIYETEIINVERIIGNIANIDSEFEIMEFLVTDGTTFYDLNQLINNNSNNEINISGNYTYHDDIDFEFKEGINVNRSLIINGNGFTINGLNSSRIFNINGDNVTINNISLINGNGYEDTYDSDGGAIYWKGADGTLIQSNFTNNSGYNGGAILWEGDNGRIINNTFKNNSAFDGGGAITITVERGIIINNTFTNNSASYDGGAIYLIASSGEIINNTFTNNSGYKGGGMICYADNLSMINNTMESNIASDDNGGAILWEGEIGRIINNTFKNNYASEEGGAISIRGEIGEIINNTFTNNNASYRGGAISIIITSGEIINNTFTNNSGYSGGGILCYGNNVSIINNTMESNIASYDGGALYVSMDYAMIINNTIKNNNASDNGGAIYWDRYKGIISLNTIANNNANHGGAIYYEGYSSNLNYNIILNNKNSEIYFDNVRTFNGSNNWFGNNASNYNLNPNTSFEYDNSPNVTLSDWLFLNGTANPKIVNAFESSQILFKLYSYDGILISEYDNSLITDTKLNLSAERGRFDKTSASFNEPINYTAIEGGRDTIRGAIDKSGYSINLTNRRVSSKIAMDTKEINYSRNASIKLNYNDFAGGNVTIRLMGENNEYLFENMTLNKTIFLGVINRDSYNVRIEYSGDRSFLEENISESLIVNKAGTKIVPTNDTIDLGIGENSKVNYTFYVIDDEGQYITNPEDIGNISFKSDGSAVEVDSKTGEINTIKEGTANILIRFQGDENHLDSNASVYVISSNKIRTKITAENLTTDYKKDDYIIARLTDLTGKPIANAKLIVELNGTNNYTTNSKGEIKVPTKGLDSNEYIAKIIYEGDESYRFSNASVRLIVNKLNTEITANNITTIYNITKELVIRLKDVNGDPVSGVELTVDLNGMNNYTTDDNGQAIVEIKGLIPNNYTAKITFEGNGNYNKASTESDIEILKIPSILNGTDMTVNYKEDKYLTVSLKDKDNKPIHNASISVELEGIKNYTTNSDGQIKVPTSSLPAKNHTAMIRFEGNEIYEKSNATAKITVNKISGKLTASNVTARYGDNQNLVISLKDSKKNPLSGFKVSVDLNGKKNYTTDSSGQIKVSTKDLVPDTYKAIIVFAGNENYTGSNASASVRINRINTTFKYTNMNTIAFDSNIEGRIGEYFRFQLLDEDGKPLSGKQVFIGFNGVKYNRTTNETGEARLQINLKYVNHYTFAIAFLGDDYYKGSFNVALINVTEQIPVLSTSAKTYKSSAKTKTLTATLKSSRGHVLAGKKISFTLNGKVYTANTNSKGLASVKVSLSKKGTYSFTVQFGGDSTYKKVTKSSKLTIK

SEQ ID NO: 16795 - protein, 1471 aa, synthetic construct; identical to SEQ ID NO: 4465

SEQ ID NO: 16796 - protein, 1639 aa, synthetic construct
ENINESEVVGNAEIENNLSSTNDNFEVSKDIGYNVSKKISTDNSNENLRNSQHMTLFIISDNPGTNILDKAILELSNENKINGVNLIIRNGNQVKSMNENELSYLLSDCDAFIGEWISSDVDSVLTSVLVKNPDLSNKKLFLVLEPPSGNLNSGSSSLNLIRNNTLNYNKIFTNYSNEELISYFKNTKRGNSYSIINNYLTNGNGKNFDSIFNRLVLYKDLNDKNNLKNQILFILNYLGVDVSYEQPTFTGVKNYGIYRDRWYSLDEYISTFFKATNNRTVGILESKMYIESQQLNTCYSIINSLESRNYNVIPVFADGGSAEQLKVMVESWTSAGDDISGFLSNSSNFDVYIDAIVSMVAYGVGGENFTKATSFFEEAGVQVFRAVHSDHVSNEQWELGSTGLTTEKSDKWWHITIAEAQGIIDATFIGGNSSYISNLTGAQITTYIPHEGNIGLLADRIDSWVDLKYTLNEDKLISIIYYNYPPGKQNIGSSYLDTIKSIYNILYTLKAAGYTVGSLPVDVSELEDLMLTCGINVATWAPGELEKIANRSCITLLPVSEYNSWFNSLDEIVRIQVSNGTVAYIGELTKRAVELDYTKTIGSTIDDWYNQVVSLLPDEKSVEAKEVLSNIVRALKDYANTHSQDYYRLYLKYFDEFKELNIQGLNGWGETPGNVMVVNKNGTDYFVIPGLTFGNIFVAPEPQRGWESDIKNLYHCTAVAPTHQYLAAYYYMQTRNPNAMVFTGRHATHEWLPGKEILLSATDYGSVVVGDVPQLYFYISDGLGEAIQAKRRGFAVIISHLTSPMSYAHLYGNLTSLANLINDYQKVGSNSEKNKIGEKIQDLIISNDYSTNLGLNKSQIKSISIDSLIEKINIFLKSTQDTLHPLGLHALGEYWSEEDIASTVSAMLSHDFVLENNQGTLNLFTELSNYYYSKSYGDLTPFEREFVLNKSYDICKALIYWDVNTINEVLINDNVKFNNSNFYACLNLAKRYINLINQSISNELNAMLDGLNGRYIPTGEGGEIVVKPSILPTGTNIFQDQSSELPTQDAWNYAKILALLTLADLNDTTEKIIMGIWCVETARDDGALVSTVLYLLGMKPVWTNSSSAGFDDEGNPTGKKVGAMPEVIKLNDLTRPEGWNKKRIDVTIITSGLFRDLYSSQSVLMDNAFRVALARSYLTLINNKTLMNGKYGKELRQALDCVMEGINYYRASNEALKDNYVAQHWIKDCLYYLSIGYNASYAGECAITRIFAPPNGDYGAGISKLVSMSWTWNNTDELAQFYLGRMGNMYSKNYWGDTNPLVFLKALSNSDTIITSRNTNQYGVLDNDDFFDYWGGLSMAVEHVSGKSPKMNVLMYADKDNAYISSLEEVMYREIASRYDNPDWIKGMMKEGYGGARYMSNKFVSNLLGWQVTRPDSVSDDLWNRVYNTYYKDKYNLGVKDWLMSGNNAYSLISMSGTMLSSIHKGYWNADDATIRDIANTWVQATVKNGVACCDCSCGNVAMMQWAVQYVNPDILAQLLPKLYDATENPVFLNNTHNPNTKPENNNDPQVEPSTPNPTDGSSSSSTISNNATSTNSNQHSLSNSQNSQGNAVSDVGDSSSSDSGTFSSEGADVKKAIEINPITQQSASEVGMSLLAVL

SEQ ID NO: 16797 - protein, 1659 aa, synthetic construct
ASSDLSSSPADNENLEIDSFDSNEDLTVNTNTNYIESGNNLEIDYKSNSKESVNATNDIKEETVDYNEDISVEKNNLKSSKLSSVYKITESNYSNYFNKSGNILSNVNPGDTLDFSGSFNNKDFKIDIPLTVTSSDGAQFIDCSFKFNKGSDGSNISNLNINSSRLQSPLIYLDSVSNMNVFNNNLFSCASKSYALCFSNVSYSSAYHNTLQTTAFVVGWGHPSAFVLAGANNLNISSNNVIVNDSNGIYFTTYVGDTISANLINENNYIFNNTVHSVRGVEWAVDENGTTPLPSSFCYAIQVMGSGNKLLNNTVYNAYRGISASGSNSVVAGNVVYDIKGNYYSGNTKDDGGDYGINVGPNSIVENNTIYNSHFNKNSGVAISVGSNTTVRYNNITNINGTGADLSKNFIEFSHNRIDNVSDNGIRVKGQYGNTNISDNFINSTDSSITLLRSSKDKYPSRINIENNDFYTDVSPIYYLEGYIGKLTAKDNTLNGSSISDISIDVPSSSETKVSINSTKIDFNESVLIMPTVSAYGLSLEGLVDIIVNSQKIATVPIGSNYTFTPTEAGSFSINANFTGNEEYKPSESAVLILTVTPKETTTSIIISPSTVELNDTVVISPFVRYNGTLLEGFVDILLDGEKLDTVEIGSDYSYVPNSSGSFYISASFSGGNGYGASVSDMLILTVNESSSIEDPDDPTNLTVSSILISPNTVEVNDTVLISPFVRCNGTLLEGLVDILIDGEKLDSVVIGSDYAYVPSTAGTFNISASYAGGNGYEPSVSDIVVLTVNEKQIIDNGTDNNGTDNNGTDTNGTGTNGTDTNGTDNNGTDTNGTDTNGTENNGTDTDQIKIIINDDNYSDYFDNGYPIDLDVDGNYTLIIDSLNNKDIIIPSGFNINIIGKEGSGTINNGTIQLGDGTDEVGDVKISNLTFNNYNKDAIVINEIAYDLTVENNKIIINTEASPGNLYFSVYGINAKGYVDSLAVRDNDIFLNGSAPYLYGVSLGGYGAIANPQNIFVQNNTININSTASMGMAEGIYLDNPINAAVLDNKINIESINDVYVYGMQIADSAFSAIGEGKTGVKSPYDIMIESNDLNLKSKYMVYGITILDYGCDGSLNELGQPMTNMMDLDTTIQNNNLVADSEKAVMGIVGKTYNMSVLCNNLSVIGGSIEGVASHDALGVDNYALGVQYSGKDYTVLVKDNTVSTNVLAEYLNNKDYEAYVSFVNNTIYHIDGPSSGNDTPENGTGDNGTNTNGTDINGTDTNGTDNNGTNNGTNGTNGTDTNNTDNITKRTVKDLQELIDNATSGSVVDLGNFEYLDVSNIDISKDISIVGNNTVIRTAGDGKPVFNIKEGLSSVSISGIEFMANNGDVLIRAKAVNSTSRLAIETPEINIINNTVIKSDDGVVAESVTVLELDSSRCILAPTNDIKVSNNTLEIGMNPFNFVVESVINAADVNVPVGGDLQSKVKSVIHYEDMDTVAVAKADGRVGKYFEVNLTDSDGNPLSGKFVQIGFNGAVYNRTTNETGGVRLQINLGYKGTYTFAISYLGDENYNGSFVVAKIKVSTQNTKITSSSKTYKASAKTKTLTATLKSSVNGNLISGKKLTFTVNGKSYTATTNSKGVASVKVSLSSKKTYSFTVKYAGDDTYSSSSASGKLTIK

SEQ ID NO: 16798 - protein, 1535 aa, synthetic construct
LNNHPELSNKKLFLILEPPTGNINSSSSSLNLVRNSTIDYKKIFNGISNDDLINYFKATKRGNNFESIQEYIDNEGSSFNSIFNNLVLYKDINDKANLKNELLYILYLLGHGCSYESANFTGVQASGIFRDRWYSFDEYVLTFFNESRNRTIGILESTMYIQSQQLDLVNEITERLESKGYNVIPIYCPAGNAEQLNIMVKYWTSACSNISGFLENPQDFDIYVDGIISMVAYGVGGENFTNATKFFEDANVPIFRAVHSEYITNEQWELSPVGLSTTKSDKWWHVTIAESQGIFDATYVGGVDSYISNRTGAIILTFVPVHENIELLTDRVDAWVDLKYTPNEDKNISIVYYNYPPGKQNIGASYLDAITSVYNMLYTLKDEGYYLTDLPNNVSELEDMMIACGINVANWAPGEVEKLANRSGVALLPVDEYLEWFDSLDDIVKVQITEGPVAYIGQMVRRAVLINYTDEVETMVNDWYNQIKALLPENQTVAATNILDKLVNSLKLYANASSDGDENASLYYDEFLRYYDEFKSLNVSGLNGWGEAPGNIMLVNRNGTDYFVIPGLTFGNVFIGPEPQRGWEADIENLYHCTAVAPTHQYLAAYYYMQTRQSNAMVFVGRHATHEWLPGKEVLLSYNDYGSIVVGKVPQVYFYITDGLAEAIQAKRRGFAVLISHLDSPKSYTHLYGNLTVLATLLEEYDNNHIIIESDSDKDNQAITYQVIKDNQTITYQVINQELEDNLTRAIKDLVIANNYYLTIGFTAEELNNTDMFSLSSTLNAFLKNTQNTLYPLGLHAIGQKWTDEDLANTVAIIVSHDFEYGGKKTNLFDQLSLYYYGEKYSNLTPLKRDYILNRSVDVCKALIYWDTETVSDTIGIGSPEFIESLNIAKKYIDLYNQCISLELEEMVSALNGGYVPVNIGGESVTVPQVLPTGANMYQDQSSELPTQKAWDYAKTLSLLTLADLNDTTEKIIMGIWCVETARDDGALVSTVLYLLGMEPVWHNSSSAGFDEEGIPTGKKVEDLPNVIALENLTRPDGWAKKRIDVTVITSGLFRDLYSSQARLMDNAYRMALACSYYTIVNNKTIMDSEYGPQVYDALRSIMRSISFKGMSNESLEDNYVAKHWLEDCIYYLSLGYNSTVSGEYAITRIFAPPNGDYGAGISKLVSMSWTWNDTDELSEFYIGRMGNMYSKYYWGDTNPVVFMRALSDTDHIVVSRNTNQYGVLDNDDFFDYWGGLSMTVEYLSNKTPTMNVLMYANKDNAYVATFENVFYNELNTRYLNPEWIKGMMQEGYSGSRYMSNKFISNLWGWQVTRPSSVSETVWDDVYNTYYKDKYGLGVKSWLQSGNNAYSLISMSGTMLNSAYSGYWDADDATLSDIANTWAQATVANGVACCDCSCGNVAMMQWAFKYVNADLLAKLMPKLYDATQNPLFYTNSSDMPTNSSNIDRRTTNSSAESNNTETVQTNSSSNSQQSANGNTNIPGASGGYMVGTEADAQSDMASDSDAGMNDANGEGRSVEVTKSTSTPVAPKDVSM

SEQ ID NO: 16799 - protein, 1302 aa, synthetic construct
GIRGPRIYIDQYYGEISNSGNVYTDEYEEKGLFSDYGMGISFESNEGLVPLIHYYPSNESLPSFYDPRGGGDSEDDYEDEDDDSDIAVKDQGIGGNCWAFSGIATLEACLEKVTGEEFGFSEGNAKNLMAISSIYGLNIDTNNGGYDTMFLAYLASWLGPIYEEYDTYNPLSSLSIDLPSVFHILDIDFLAPRKNSLDNDEYKRAIMNNGAVSVTFDWVENKVSNGFHSVSIIGWDDDYDDIDSLGNYAKGAWIFKNSWGYEWGDGGFGYLSYKQKLSEEIAPYMHAYTFSFKENDIGYTDIYQYDFSGLSDFLILNSTNAYYKNKFIAEDNEFLYAFSTYFDKETDFTYSVSINGNVITKTEDGKDILTSIHHSPAGYHTIPLGYNLTLKEGDEFEIIIKLLNDNQNRIPVCQADELYRTSLPSNASFMSLNGKDWIDLSNLASSNEFSSLGIKANTSQVACIKAFTSNWRMNSDSSIVNSKNHSIITSEGTELSQYEICQLKVGSFTRASANETIIIAMSIPEWRNYQDEYENYIEVHINDEFYYVRVNEGVAYLDISFDKIGHYDFKAQFKSNIYSSDIVEFDFEVVKDSIFDVDDLDASNPGTFKELQDIIRNAKNGSIISLDKDYAFSSGDESVVDDYIEINKSLIIDGKGHIIDGSSDSGIFRLSSGDNLTLRNIKFMNADNGAIVSNGNLTVSNCYFISNCASGSSSTSTSSSDSSSTACGGAIYCEGTCFIVNSLFESNSADAGGAVYCEGTCFIVNSYFDSNYADLGGAVCCDGSCYIVNSLFDSNFAVYGGAASIVGNESCEIIDSNFIENEAIYGGAIYLESYCYLLDSSFNYNYANNGGAIYSIADLDIHTTGFNYNEAYKDGGAIYLVNSTSYINEGNFTENSAKERGGAICALEFSNLTIRWAYFMDNSASKYGSAIFSVNALNITDSEVTVSSGKVELICFAYDYASNGQAYGDLYFDENSFYISGAPEIYYFREKIAHKLALDLEFNNIELIRGGGVEISRDLNDDGWEDKINNNMLEICRLVDDDDYMTVLRMKEIEVILINKNNRSDIQKFKIPFNVKLNGYFLNTSSLKYGSYILTGNLSKDLASNCIVKNGTLKVLRKTTLSSLSTFTKVYGNSKNLVVTLKDSSGKAIVGVNIAVKLNGKTIKAKTNSKGQISIAISLKPKTYTAYISFAGNDYYASASKKVKVVVKKANPKLTASKKTFKLRNAKKYTVTLKNNLGKALKNAKVTIKVAGKTYTAKTNAKGQVTFNLKLAKIGKFKAVVSFAGNKLYNGLKKAVVLTVKK

SEQ ID NO: 16800 - protein, 1356 aa, synthetic construct
TIYEFTSIYEYASLNDTYIDGIVSTKIPYALENIELYVSDGSGDDENGNGSISNPFKSISKALSEGYQKSTNITVHILEGTYTGSLNSNLRIPTTVNILLIGEGAAKTIISDSSSDYFITALKGKCELRISQMTLNRAARDTQSAIYIEEESNVAIDNVTFIGGQGNYGGAINTAGNLSIRNSYFHDNGYADRTLRANAYYGGAICNDGTLIIDNTIFESDHAGRLSEIANQGTLYMNNSKVIDSINAYSINMDLVAIGAYGGQKGEITIENSQFIVSSKTINELNDRIYDPTRALTCLGIGSCQHAILINSTFIGEGAVFSPYVFGGINSNNLASGGCTMIPGDLEVYNSTFRNVQAVNIIYSRTDNVRYHSQRVFEGCLFDNVEYIIAVLNTGNFSVEMHDCVILSDDLAKIGFGSEKTMKMDISNNWWSSNDGSYDNATLGTTNYISNCVVKLKEISSETVHPESYLILTLNSSNRTGLLQDAILAFKAYDGENISDYDGALYPRNFEMSAINATLDDLEGTIINKAINPFEGVENSGYYIEAIVDNQKVNLTVHDSLSIGNAYILAENISINYNETQINVTVLEENGKRADGGNVSLKLHDKTYISEIINGTAIFDIDVLPKGDYLLNYSLNRPKVYHSISNSSNLTVIPFKINAYANASNIKVGEDAIVIAYLDKDAGGNVTLGEEIQKVNDGTATFIISNLAKGDYTYQLSYSGDEKYDNETFHVSFSVNLKDASISVENDTLDLFVGSNETIVATISPIGLAVNYSCSNESVAMVDENGVVSAVGAGMAVITLTVGDDVTYSKNSSSVTVIVSKIPTIIEIVNDTISLEVTDSLDSIASLNPEEGGNLNYAISDDLIAKIDNGQITALSEGSAIITVSFDGNDKYTKAQNKSIKIIVNLKEASVSAFSNIDLLVGENDTLSPKTSPEGLDVRYESNDTSVVLVDNGQAIAVGEGNATITLTVGGDGVYAENTTTVKVSVSRIATMIEIEKDTIELKVNEESPIGAILEPDVGNLTYSISDESIAKVENGKIIALAEGNASLSISFAGDERYIGTNASVEIRVNKINTILTETDITTTYKEEGYLIATLKDSQNNPISGAVLTVDLDGIKNYTTDSNGQIKIATNNLIPDTYTARISFAGNENYSSSNGNASVTVKRIGTKLNFNDMNTTAFDSNIEGRIGEYFYFQLVDCDGNPLANKKVIIGFNGVKYNRQTNETGWAKIQINLKYANSYTFAIAFLGDDNYSGSFNFAVIRVSQQTPKLTASSKTYKSSAKTKTLTATLKSSSGKAIAGKKISFRLNGKVYTANTNSLGVATVKVSLNKKGTYSFTAQFSGDSTYKKVTKTAKLTIK

SEQ ID NO: 16801 - protein, 1510 aa, synthetic construct
FDYNFTDGIVIDRPVTIIGNGHTINAAEMVRIFHIQADNVKIKNITFTNAISNGYGGAIYWQGANANLSSCLFENNSAVMAGAVAFYGSTGSIVSDCSFMNNSANNGGAIMWQVSDDSVVSDCSFMNNSAIQGGAIYWSSNDGVVSDCSFVNNSAVRNGGAIYWEKNNGNVSGCIFVNNSADNGAIYFNNQNFGQNLTINHNIFLNNDAVAIYFVRNDSASNADYNWFGNNATNCDIAPTSNNMEMNTWLFLNATSEPEGISILDSCDIIFKLYAYAPSGVSEYDSSRLKEINLTVTPTNGRINTTQAKLGEKVHYTPESAECMLTASIENAFYTTRLKISDGTTFRDLNNLINRNDNDTIILDNDFIYNSLFDSKFKNGININRPLTIVGNNYTIDATGMARIFRIQADDVEINNITFANAKIDGNGGAIYWYSGARGIVSDCSFVNNSAKMYGAAIYWNGANGNVSDCSFVNSTVTDEHGGAIYWHGANGVVSDCSFVNNSAKKYGGAIFWNAANGVVSDCIFVNNSAKSYDGGAIVWNEGLNGAISDCSFVNNSANDGGAILWNEAAGGTVSNCSFVNNSANKSGAAIYWDSGARGVVSDCSFVNNSANRSGALYWFANDGVVSASIFVNNSGDNGVLYFNNTNKRNLSINDNIFLNNDVVAIYFVNSDSTSNADYNWFGNNASNFDTEPLTTNVEISTWLFLNATADPNPVEILNSSDISFKLYSYNATGISDYDNSQLQPVNLTLTATKGDVDSIAKLGETVIYNPTSLGTGSVTAKVENVAYSIEINNIKSNPNLSVESDELTYGNNIAIALNYESAATGKVNITLKGKKSDYTFADLDLNETISLGILAADEYEVIVEYSRDEIYTNASARGTLKVNKANSTLTVSDIEFDYKDMGSGEISFTNATGVEAKVINHDEAIVFVRGNTITVLNLSADSYILEVTTITDENHNEVSKNATITVRKVNSTINVNDIVLYYGESINLAVTTDGAIGISADIDGENVELNENIVTIPDDLESGNHTLTITTVPNDNHKEASKTVNIVDCRIGNITVVVDGVEYSIPAVNGTAITTNMPEEIEKLKENITDLTGQLEEAQTNATNLANNLTIANQIVDKLIAQLEEAQANATQTINDLTHQLNEAQTNATKIANDQTNANQIVDNLTGQLNDAQTNATKIANDLENANQIVDDLTRQLEEAQANNDQTINDLTHQLEEAKVNATKIANDLENANQTVDNLTTQLEEAKVNATKIANDLENANQIVDNLTDQLEEALANATKIETVVVDGKEYPIEYVNGTATVTTNSTGPQNITHERKATQIIYKDMETTAIDTKVDGRIGKYFNVILKDSEGNILANKPIQIGFNGKVYNRTTDENGSAKLQINLIKADIYTFAICYLGDDDYNGSFVVSKITVKAQKGTLTVPNKSYKATTKTKTLSATFKAASGKVLANKKVSFVVNGKTYSAKTNAKGVATVNVSLNKKGTYSFVAKFAGDNTYAAVSKKAKLTIK

SEQ ID NO: 16802 - protein, 1460 aa, synthetic construct
SHVEVDGIDINYTDLETITVTVSDNNATGFVTITINGTDIELTKEVSAGQAVFDVKDLVVGEYNVTAVYHSDRNYLNSTASDTFKVDKSDVKNMTISPVNITYGENETITVRITDNNITGNITISVNGTEYGPVELDNGVAVFNVPGLIVGDYEVTASYSGDSNYNPASSTETFTVDKEKPNVHVVSENIDYGKNETITVIVDGFNVTGNVTIKINGTEIATKEINDKGRAVFVVPGLQAGEYEVVAIYNGDDNHESSEGSDTFTVATVTPNMDVETEDIDYGDNETITVTLPKDAKGSVNITITDENGTVVYEGEAQLEDGKATVDVPGITPGPYNVTVKYPGDRNYNPTNKTVRFNVDKVVPDVDVDTVNIDYGDNETVTVTVNPVDGGVTPTGSVNVTVRDSDGKVVYEGNVDLVAGKATLDVPDLGAGDYTVDVRYGGDSNYDDSTGGSSFNVAKVSPDMDVQTEDIDYGDNETVTVTLPKDATGTVNVTIKDNDGNVFYEGEAELKEGKVTVDVPGLPAGDYTVDVAYGGDDNYNPVNSSDSFSIDKVSPEVDVGTENIDYGDNETVTVTVNPVEGGSAPTGTVNLTVKDSDGKVVYECQADLVEGKATVDVPGLPAGDYTVEVAYGGDENYTATNSNGNFAVGKVNPDMEVDGEDIDYGDNETVTVTLPKDATGTVNVTVKDSDGNVVYEGEAKLDDGKATVDVPGLPAGDYTVEVAYGGDDNYNPVNSSDSFSIDKVAPEVDADTEDIDYGEDEPITVTIDPVEGGSTPTGTVNVTVKDKDGNVVYEDQVDLVDGKVTLDIPDLDAGDYTVDVAYSGDENYTARNSSGSFTVNKAKPELNVDSEDIDYGDDETITVSLPEDATGTVNITITDKDGKTKVFNDVPIENGKATISVPDLDAGDYNVTVDYPGDDNYLGSKATSSFKVVRSNSNITLETENITYGDEEPITVDVNPVEGGVTPTGTVNITITDKDGNTKVFNDVPLENGKATVDVPDLAAGNYIVDVKYSGDGNYDPDSTEGAFEVAKAVPHIEIHVYDIYYGDVEVLTVTCDAPGTVDITVNGVTVTVPLDDGYDKRVFSSIVRAYSGKATLDLVNLAVGTYPAKAVYNGNENYTSVSDNDTFHVYKENTTTKISVDDIKLGEDAVIDIEVTHEDGSEKINTNITVTVDGKDYTVELIDGKGTLTIPDLDLGKHTVKAVYPGSHNYTNSSNATSFKVTKVTPSFDISTENIQVGDDETVTVTLPDDATGTVTLTIDGKEYTATVENGKATFVIPGIKAGEHKVNVAYSGDDKYAPAKRSDSFTVSKVKPDMGMDAPEIKVGQDGVITVTVPEDATGTISITVDGKTYTASIKDGKAVFHISGLGPGTHIVKAYYSGDGKYLAGSVDGTIVVEPKNGTSPQDKGKAHGGIDLESKKTGNPILVLFMVLFSLILIPIKRRRDDDEEEENEDQINRID

SEQ ID NO: 16803 - protein, 1554 aa, synthetic construct
KTVTVIGGIGQVNFGSLETDTYEATVSFGGSDLYEPISNATEFTVYPEEEGTNFEIDTNASEITYGASIKVTHKLPEDATGTIKYYLNNGTVLGELPVEEKLTLDLDAGYYVIFANYSGDESFEPDWDSADVLVKQVETEFHIGLQQQVISGNPAYVTHSISEGATGTISYYLSNGTFLGEVQVGETYVSPKWKVGIYNITANYSGDRNFVPASDSMEFRINPDFSFDIYLDEDDVIYGQTTTVRPSLPYDATGTVEFYYNDTYLGKVTIGQYEIIMVDGEEYYETPGVELPEFDVGVHEIVGKYLGDKNYDPAIANVRLTVLSTETVFEINASPSEIKYGEAAAVIHKLPSLAVGTILYYLSDGTSLGELYYYEDLALPKLAVGSYEILANYSGDENFNNASASTTLTINKADPDFEIYIAFPSYDFGDSPVVFVNLPDDATGNISYYLSDGTFLGELPVDERLSLPILNVGTHTIIGNYSGDGNYNNASASMTVTVNEVSMEFNLGISAEEISYGETATVTHRLPSLAKGNITYYLSDGTLLGELPVSENLTLPKLDVGTYIIIGNYSGDENFDGDSANVTLTVIQADPAFAISISAEEAAYGETVTVSPALPEDATGTVIYYLSNGTILGELAADENLTLPTFDVDVYDILANYSGDKNYLNASAETALIVSQADPGFEISISAEEAAYGETVTASPVLPEDATGTVIYYLSNGTILGELPVDESLTLPTFDVGTYTILANYSGDSNYLDASAEKELTLIKADSTLEINDIAFDYSKTGSAEAKTSGAEGIVASVAGHDEAVVEVNGNEITVSGLDAGSYTLSVSTIVDDNHNSASKNITVTVKKIDSSLSVEGLELDYGESGNVDAAAEGATGISAKIGSKSIGVNGYSIPISGLDAGKYNLTVTTIPDRNHNPVTKTAQITVNKIDSTLEANDMAFDYEGTGTSSVTYTGATGVKASVIGQPNAKVNVKGKEISVSGLDAGNYTLEITTIPDKNHKAVSQTVNVTVNKIDSKLDFNNLVDYGSAMNVTVKTEGASGIMAEIDGKELGVDKYTIPISALDAGEYDLTVTTIPNSNHNPVSKTVKVTITKLDSELAVEDLEFDYNSTGTTNATFEGATGITAKVVGQPNATVEINGNSISVSGLKPGSYTLEVTTVPDENHNPVTAKSAIRVNKLETAISANDISTVHGADKNLTAIIRDINGNPVANATVSVSLNGSKKYVSDSSGQISIPLKSLAAGNYTATISFAGTEIYGKSSASIKVAVDKEPTSIAATNVNTQYGLEDYITAVLKDGQGNPLGGVKLNVDLDGNRTIVTDSNGQIKIATKDLTAGNYIATISFAGNGNYMASESNAIVNINRTGTRFNFKNMTTTAFDYRIEGRIGKYFYFQLVDEDGNPLANKNVCIGFNGVKYNRTTNETGWTKLQINLRCVNLYTFAVTFSGDDNYTGAFNVAMINVTHQSPKLTAGNKSYKASANTKTLTAKFKSFKGTAIVGKKITFTVNGKKYSAITDKKGIATVNVSLNKKGTYKYTAAFAGDSTYKKVSVTSKLTIK

SEQ ID NO: 16804 - protein, 1927 aa, synthetic construct
INGNGFTINGSNKAPIFHITGDNVTINNISFVNGYANAYVNGYDGEDMRGGAIYWQGRNGKVTYSNFTNNNANDGGAIYWFGTDGIVEYSNFINNNANDGGAIYWFGTDGIVEYSNFINNNANDGGAIYWFGQNGNVENSVFTQNHAGSYGGAIYCSGAESIVEYSNFTNNNAYNGGAIYWFGQNGNVENSVFTQNHAGSYGGAIYCSGAESIVEYSNFTNNNAFNGGAIYWFGQNGNVENSVFTQNHATFAGGAIYCSGAESIVKYSNFTNNDAIKGGAIYWNGRNGNVENSVFTQNHVDNDGGALYWDDSEGKVTSCIFVNNTAETKHSGHLILPMGRGGAIYWNGRNGNVENSVFTQNHVDNDGGALYWVDSEGEVTSCIFVNNAADVEASVYYNERGAYSNFSNNIMLNNGKNEIKFKIFDRSNIDYNWFGNNLSNYNEKPGGFEGNIWLFLNATVDPNMLLLGESSEITFRLYAYDGTNVIEYDNDLIYPINLTLISSNGNINETVGLEETAIFTPQNVGTAIVTAKAEGFDIQTVSINVRAASFSDLNRTINGNEDAEITLGKYYEFDPETDGAFIHGIIINRTVTINGNGTTINASGKARIFQVIADNVTLNNITFTNGNASGEGADRSGGAIRWEGANGIISYSNFTFNHAYLTGGAIIWSGENGTVKHSSFSQNDVDGSGGAIRWAGAKGTITDSDFYLNSATDAGAIWWLGAYGTVKYSNLINNHAGSRGGAIMWSGENGNVTYSNFSLNNGGSGTGYDGGGAIFWDHLNGTVSYSNFSNNHINGHGGAIAWHEQYGNVSSCLFVNNTATDGASVYHNDHSESYSNFNNNILLNNGENEIHYDVYDGSNADYNWFGNNGSNYNEKPAGSVGNVWLFLNATADPNPISILGSSDVSFKLYAYDGLDLIEYDNNLLYPIILSLSSSNGNINDTAGLDEKIIFTPQNIGTATVTAKAEGIFQTLSINVYPPSFSDLNRTINGNDDDEITLDKYYEFNPELDSAFIHGIIINRTVTINGNGSTINGSSKARIFQVIAPDVVLNNITFANGNANGENEGGYGGAILWEGDNGRVEDSTFINNNASGYGGAIFGGNCSDNVIFQNNHAGIEGDDWYVPKPVISVNDFTSTYKSGEKLYVNVSYVGTQIDGINVTISVFDSSNQLIGNYSCLSGDGWTVDLDAGNYNALVFVDSDEYGYGEETIALTINKRASQISANPLNTTYNGNENIIMILKDNYNESIANATVLVDFNGEKNLTTDENGQIVVSANGIVPGEYWAQFIFDGSKNYDGSDEKVKVIISKASTSLSSENMNVSYNESKYLIATLKDQYSNPLAEISIEFKSNSSTVKNENTDNKGQAKLLIDFNPGTYNIDISFAGNSLYDASYATVTVVVNPSDDSGNGTEPSGNGSSGNGTSPEGNGTSPGGNGTSPSGNGTSPGGNGTSPSGNGTSPGGNGTDPGGNGTSPSGNGTDPGGNGTSPSGNGTSPGGNGTDPSGNGTSPGGNGTDPGGNGTSSTVKDTLIGISTSTVIYGNDELINLTLTTADKTPIDGVIELRVGNSIYNVTITGGKGSKALSNLTIGNYTVTADYKGDSEYNSSTASSSFTVRDRIETRIIYNNMTTAPVGANDGRIGNYFRVKLVDENNQALAGVPIQIGFNGRIYNRTTDSEGGAKLQINLAKEDGYTFAICFKGDDNYNASFEVAKIDVNKKYPKPNSANSESAEPANKTQKNTRLETSILYKDMKTESVLKAEGRAGKYFEIQLVDNNKKALAGVPIKIGFNGVVYDRITNATGGAKLQINLLKVTQYTFAIAYLGDSKYQASFEVAKITVNKQTPKITAPQKTFKAKAKTKTVTATLKSQRGTLLSGKKIKFTVNGKTYTGTTNSKGVASVKVSLSKKGTYTATAKFDGDANTKATSVKFKVKIS

SEQ ID NO: 16805 - protein, 1452 aa, synthetic construct
AIAMFTDEKIRPVTENTVKGADNEKVNYTAVVRDVDDLVEDAEATITPDILYNGNLGKDLAYPAEEITFFDSITVNGGIYIEIQNDSSYLASGATNRTDIWNIEAPEDADFVAGFVYVAYNWDKTSAGIPALNITFNGVSVAPVAHYRDQSNMGTYGKYGYGLLVYDVSDLLEAGDNVFTLTKDANMTAIYPSVLVAGYDQEVSDSMKTIYMFNGADLLSNANNFLGRVVASNSVLDIELPDDVIDCALGIFAASSQKGEGNLIVNGESFEDVWNGSSNSVQACVFNLTDDIEESNTVSFVATGSTILALQQFIFVEYELVSVDAKLGSEYNNVAFAGTDNVLEFNITNDGTIPTAYTIEFYIDGELADTLELELANGESDSLYLVDPTIRPVDETTVNGADNAKVNYTVVITDNSTGDVLDIITITPSVLYNGNLGKDLAYPAGEITFFDVITVNGDIIVIGMNDSTYLGSKTTGRTDVWDLTTNEDIIFAAGYLYVAYNWDKTPAGMPVWNTTFNGVTVTPVAHYRDQSNMGTYGKYGYGLIVYDVSDLIVAGENTFTLEKENGTTAVYPSTLVAFYNMPESSTYVTTYLYNGADLLSNANNFLGRLVASNSTLDIDSFDNIVGADLLVFAASAQAGEGSLVINGDLVADIWNGSSNSVDAYAIDLGKNPKASNEVSFVATGSTILALQQFIVVEYNVPSAEASLVSEYSNVAFAGTNNVLQFNLTNNGALNTSYIVDFYIDGKKVNSTQIALNSGESFGQYFIDDTIRPVDASTVNGAANAKVNYTVLVSDKDTGLILDEVTLTPSVLYNGNLGKDLAHPPEEIVLFDTITVNGDVIIDTLDDSTYLGAKTTGRTDEWNLTVPSDADFEVAYLYVAYNWDKTASGMPEWNTTFNGVNVTPVAHYRDQSNMGTYGKYGYGLYIYDVSDLIKAGLNTFTLGKENGTTAVYPSTLVALYNVNESNVLTTVSLFNGADLLSNANNFLNRTVASNNVLELDFTVFDEILSSQLYVFAASAQAGEGNLIVNNETFTNVWNGTSNSVDAYIVDLGNDPSLSNDVSFVATGSTILALEQFVVVKSKYQTSSDLQKLIDAAEPGSTLDLGDNVFQDVANVVIDKNLTIKGGSIMGKAGETIFVIPAKSANGPDEVNITGVDFIVEDANVIVQATADNGSSPTSIDTPNIRISDNFIDMIDGSVVPESVTVLKLDSERGVLAPTGELKVTDNAIAAGIKPFEFDVTGVSNGSDTNIPEGGNIPAKQASVIHYQDMETTAVNSKIEGRVGKYFEVNLTDTNGNPLANKFVQIGFNGVVYNRTTNETGGVKLQINLGYKGTYTFAISYLGDDYYNGSFVVSKIKVSTQNTKLTTAAKTYKASAKTKTLTATLKSSVYNKPINGKKVTFTVNGKSYSATTNAKGVATVKVSLSTKKTYSFTAKFAGDDMYTKSSVTGKVTIK

SEQ ID NO: 16806 - protein, 2267 aa, synthetic construct
LEPQNFTVFENPYSELEVTDDGPIASGETVNITATLTDFQGNPIEGATLEVYDTGVWIANITTNAEGIAETSIDNLGYGLHDITVIFNDTVHDVQTETVTVSVTPKKGTFTDLQYLIDTADGRLVLPYDFAFDAAYDEQFFLTGVLVDDNIIISGAGHIIDGMKKARILYINAPNVKIFNVSFVNGKSDVGAAIYTEADYLLVDSCYFANNDPEAGAAIYAESGVTDVEETIFFNNTAVNGGAIYVESGATLNVADSEFNQNTATYRGGAIWSNGTVNVKDSSFDKNDITYRVKNDDNGGAAIFNNGTLNVVNSRFTNNLLNYVIRTGDDNHPELVDGVILSSGKAKISNSHFENNSGTYGSAITALPIGTELSDLTVENCEFITNLAYCGAAIYVGSGTTLFYINDCVFIGNNATGVGSNGYVATGGAIKIAKKATGIIADSQFYNNSAANGGAIDISATSGNTASVLIDSCVFGYNVADQGGAIYIDNRTTVNLYDSTLYYNEGEALNYHIFLNGDATLGFEGNNFYTTIPTIVAEDTYAYGETITINGTFDWGVNNKPINMIYTINGAPGTAEVVDGNYTILIDNQPDVGDYTIVITAFTDENGNVYHVETAQKTISVTKATPILSVEGDEYLMPPSDDATVTISLTDKDGNGIKGTVIVTVAGETYLVETDEDGDGELTINDLPATTWAIDAKFIGNDNYNEVVNDTEEITFIADVAYFDIIIEDGVYGDKLTVIVENATDIDGNSLTGMVTGMISTGDDDISFIVYVNNGQGTNTTTTAGGVGKFTGDAYFYDSMMEFMSGPEECSAYVSPANATLYLVPWDADDLSSDIAYGDTIEFGAAVFGVNLEELNGTVYYIITELNKKGEIAIVNGSGAVNLTDILDVGTYTVISYFVDDKGNYDPESSVNYTNFKVAKATPTLNVENAQQVYADTNTITFNVTGIDDKGVKGTVIAIKPISEDVSGAIYDPETGLGELTFNGLVVGDNPIVVKFLSDDDNYANAEKTINITITQATLAIDSTITTQEIVYGKDVEADVTVTGIVQEDTVIANVSLYDNATGELLDSFNIALGLEDSISFEDLEVGDYYYTIEFTSELYAGDNFTSEVFTVNTAEILDLDSSNVDNVSYGEGIDITVYVDGMIEGDLIEVNFTVVDATTGDDVFNGTYNISNGDVITVPPLDVGKYSYSVSFYGDDKYNTGGADSIAAVGSFEVLDMSDVDVLVTADESITYGEKVTVEIDPIVSEGGLPVTGTATIYVYDDPASVDPVYVLADVELDKDGATAVLDTILPTGEYWIVVDFESDDGYYDGRGVTSTIVDLALAKLSIDPITVTYGETIPITVTALGNGGELLNGTVEFKIYGPGFEGTVTVKNGTGVTNITERFDVGTYTIIAAFGDDGANYEGFNITSLEITPATPIVRVTGSEVEYGEPSTVTVSVSDIDGMPLSGKVIVTVDWVVDGLTQVIDLDDSNEASFDLSPYVHQGTYDVTVTYIANGNYGEAVNDTETVNVTASTTATVNVEVPEDVSYGDELTIKVTAEDGAGEQIPLEAVNVTVNGETKEYPVDENGTVNLGVLPAGDNEITVALDDGTHKPTKTEATAKVAPAEAVVFVDTDNDNPSYGDVVVVTVNATNKDKPIDADACLVVDGYLIGYYDLEDGQVEISIKDLAPGKHEIEVSVANGNYSEGSYGRAIVNVDKATPVISAEGETVEWGEVATVKVNATGANGEKLNIPLVVRVIWEVSGVDELIEIENGTGEAAFQISNYVAPGTYNVTVIFLGNDEYYPVNNTEAKIILTEPKTVEMEVSITPDEYGKATNVTVTLKDVASKPLEGSTVTVTVDGKEYANATIGEDGTVTVPVEGLEAGNHTIAVDFDDGEHSPVHEEENIAIEPSTDATVEATVNVGENETTVDVIVKDSTGEGINGTVIVYVDGEPVANTTVGNDTSSVSIGQLAPGDHTVDVEFVNPNYAPTSYSTHVTESTSLTNMTVKVDKKNILYGESDITATIEFTSEGKALDGVVEVLLNGEAQNVTVTGGKATVKFSDLAADHYTVVSNFAGNATYAPSSDSANFVVERKATKFNYNDMNTTAVNPNVDGRIGEYFYFQLVDQDGKALANKSVSIGFNGKVYNRTTNETGWAKLQINLRIVFGYTFAISFLGDDNYTGAFNVALINVSAQTPKLSTSSKVYKASAKTKTLTAKLLTSSGNVDKGKKLTFTVNGKSYSATTNDKGVASVKVSISQKGTYSFTVKNAKDNTYASVSKTAKLVIK

SEQ ID NO: 16807 - protein, 2226 aa, synthetic construct
NYRYLSTRLNNLIIKAEDGAEVNVDLRGMNQNSLYWTFYGDNVTVSGINFMNANMTSYNLNNYHAVLKFINSSNSRVEDCSFSNLKSYGILAGNSTDVVISNCNFTNGSSRMFSITNSSVTVEDSIMKNFSTSYIRNSTFTMVNSTVTDFNDDDIFNFANTDLDIRDNTFKNLTFPNKTNFQRFGVFYAWDDNAGISYNFINNTFANFTGTDAYMIYRSASSSVKPMCKVNFTDNNVSNVSVGVNIYYGNITVENNSFDHMSPANTLRFSYSNIDIRDNNFTDSNSTHVYSDRCNGTIEYNNFINNSALPVSAEWGNLNISFNNFTDNKGNFSAGAIQSTGVVNIFNNTFCNNSARVGAVNVASISSNKTIYNNTFVNNTGVSGTLYVNGNATVHDNRFIDNNVSENGGAIYAAYDNSYNNYYNISANITDNIFDGNIANKGGAIYYEQYNSAYGLDNLANNTFVNNKAEYGGAIYSNKTVNVTISENEFVNNSATIGGAIFLDNYTSAFNTGTNITLNNFTNNSAQSAGAVVVYGNNTNVIGNNFVGNNATRYGGGALVTDGANGLIYNNTFENNTAFLYAGAIGTNNSKIINNTFTNNNAYQAGAILTINSTIHNNTFSGNDATRAPSVGYIDNYNYTVSSYYVYYCSSEDCSGCTACESCTSTIIDPITGAEIKVINCSNGDVPECICEDSVATLYNISLLYNNEGLNLDEDVYVYDESTILRVALNNNDMYFLYENASIPNASEYHYWAYCIEQNNSKPWQWNGTTGVLVDDLYFVRNSLDGSYVGDYIKVLVSYFYFNLDEDVYNLKDYVYVFTDTDYRANTDRVIRRVINLTEREDTSLVNGNNWINGVYNCLSFHSFIMPTTRQNLILINSCMAMQTPDFNPQKIANKENVGTGDIVNYTVTVYNNGTVSLHNVTVTERPNSMLTYLSFTDFRNQGWVQTGEMTWVLNRPLKVHETGTFNINFRVNNVTYLTNITNYIDVGCDEVSNKSAFTRTETKWPRIQVQKITLDQNVTPGSTVRFLLLVKNIGTLEASNITLVDNFNRNELEYEYRWDSYKGNWSGGHGWGGSSSSWHVDTLYLNQVLYPGQEAGVIIYFKVPNNVTVGSAYNSVNAYRNGTSEGYSSNYTIIQRPYFSIWKTLVSSKTSTIGEEVVFQINVQNTGYVNLTGVYVEDILPIGLKYLRFYNTDNHNWTHFVDEDGKHRFLLQNTLPTYYSDSQNYVARLYIVCNATEYGNWYNLATGYTEQTNKSTSQANVTIIPFGVSIEKVSNNPISQVGDQVSFTIRVRNTGIYNLTDVYVNETRNSYMVFDHFVDNSGKWILNESYATSGVPSWNYNGTFEVGAVSEFDVFYNVTNINYYGNITNTAYVSSNQTTNRSVSNQTAAYNIKVRKISNNATARVGDQVSFTIQISRDGYSWESPFSLYGIHVKDLVPDGLVFDHADNSYYWIYNESDETWYYRSGLTAGRTISLTLYFNVTKAANITNVAIVGVNNSTVKTANNTTNSIYHNLQVEKVTLNETVYPGNITEFLVRVNNTGDNNLTNVFVKENIPNGLVYYDYINKTGKWNYTEDDDGPIWLYDGILAPGAFGEFIIRFNTTVPGIFVNNVVAGSNETSNKSTENSTKVLGPIISVGKITLNKTVYIGELTEFRIKVSNDGDCNLSGVYVVEYIPDGLKFVEFKDESGLWTYNESSRTFYYNGILERDDSLEFVVVFNATRAGNFTNVVHAGSNVTNESVANNTTEALDVRMDIQKVTLNETVFTGQETGFVIVVSNTGLKDLTDVRLKEIYPDGLVYSRFIDDSGKWFNRGDYWIYNGVLAVGESTNFTVIFNTTKSGTFNNTIIVSSNETGPKNTSNTTKVVVANVTVAKITLNETVMSGEQTSFDIVVTNDGIYNLTGVVVTDAFPEGLAYSGFVDASGKWIFDDSKGNAWIYNGTLAPGESASFTVVFDTDEVGEFTNIVKVSTNQTQDKNASNITKVIKLIPNVAIQKVTLNRTVYSGEQTSFEIIVRNNGEMNLTAVTVTDAFPEGLAYSGFVDASGKWIFDDAKGNAWIYDGILAPGESASFTVVFDTNQTGNFTNIVTVSSNQTKEKNASNITEVIIKSVPGIEIIKITINRTVYSGEQTSFDIVVSNDGNVNLSNVTVIDSFPEGLTYSNFIDDTGKWFNIGNKWIYNGILLPGESAGFRIVFDTNKSGNFTNHVKVTSNETGEKNSSNVTEVIFA

SEQ ID NO: 16808 - protein, 2309 aa, synthetic construct
IFIGEGTYVESNLTISKDLNITALGEVIWDANGQRAFSMSTGSVSISNITFINGNYTRNGHLIYCAGDSLKFDECKFLSNGGNVTGTNGVIYVELASANFNNCYFENNTAGTGTSYGLISAKDSVIIVDGCTFVNNFNKNGCIYVSGSNIGSMAVINNTKFIGNNATSASGGSGGAIYASGSMAYQYSNGTVRPGAQSAVYVIDCDFINNTAFGGKYYNAEGGAIFVNANATLYASNSRFIDNTALDYEETNKSGRGGAIAATTGNVQISNCIFQGNTANNGSVIAMKFANKDLTTVNVLSISNSVIMGPGEKLIVSDFTNGSLVANNNWWAANENPSDRVSEGITVDSWVILTADPSEITGTLDEIIPIVANFRHTNSTDGTIGDLEGEFPELEVFGMTLDEGEITESNLTVDNVATLYYTPEETGETTVYAISGNAMVPIKVTITDTPQPVADVIYVSPSGADTNAGTYEAPVATIAHAVELAGAEGASGLVVIEEGIYNENGIVINSAIPITITGNGTVIIRGNNHVVNGNGAGRFGDVSESTSIIIVNTTEAVVIANIAFEDNIAANGGAILIAGTSSSNLFDADVLVENCSFNNLQGRNGGAIYAYYAIGNLTVANCEFTNINATWAALCAYQAAYGEGLTVEIKDSSFTNNSANNAPALYLQATNVVIKDSNFTDNNATYHPGAIYLQNTTATIDNCIVANNSAKYDKAAIAIHGGNIQYNPVIVKPSEVTITNSIIENNIGRDKAAPAIYLENSILNMSYSSVVNEININNTVTATYGDEKPGLVLINNNWWGTNDPSTTIFGTNITMDNWVIMNVEANATEILAGEEVKLTVDFNHVNTTAGEIEELTGGVIPRESYSVALSVDNGTVAPETLTIANGATGEAIFTAANANALITVTSENAVETILINVGEQPVPFTGVVYVSKDGDDANEGSEDEPVASLARAIEIATAEEGSGQIIIKEGTYIVDGYNITKDLTITGEGDVILDAQNQGNRLFNMAYGTTVSNFELHNLVLANVTAMYGAVVYSYAANAVLDNITVAGINHEMARLISNYGNLTIKDSVFANNTVSGIITHSGNNNLNIVNTIFEGNNVTYDSSIMGVVYVSSGRGNITIEDSKFYDNLVRQSTVRGYTDTNITVKGTEFINNTADNSPYYCSGGAIFAQANLDVTESIFINNNARREGGAIYIGINGVANITKSEFINNTIYDNEYYGDAIYTKGTTAINYCIFLTNGTRYAVYNGGSKEVNAQYNWWGTNDDPQGFAYSADASNWIIMTVTAPSTQDIQAGDEYELTVDFNHYTDGSDILELPDSLAQELTVEFTSTTGTFDNPVVTTENQVATAKYTVVAGENSITVKSTDAVWNTSFTAGEKAKAKMNVSMENNTIIVTLTDEEGAPIAGKTISVLINEDTLSNETNSSGIAAISLGTLDAGTYPATISLADSEYQAPELTVFVLVEETLVDNPIGAVIELALAENGTSIEVTLKDINGQPIGDTIVRYYIGSTDGALLPIDANGKGSFDIDNTVNQTIKVSYTKEGTEWSSYYDFIVNNEVTPVPVANNAKFDVIVREDSIDVFLYNDNLDDFEGAKIMVTIGEEDPVEYIAGENGNITIPINGDTTVELSYTDENGATVYHTVKVSTSGVDPSAEIEIIVESHNDTSIEVSVTVDGDDVSDGEITYYIGDDDDGTVVPIEDGIAIIPFDNTVNQTIEITYSDGDATESVYYTIVAFTHEVPVEPPVANGSFDVETTDDAIVATLVDSDGKPIADATVSAIVNGEEQNFTTDADGKLSVPIDGNATVELSYTDPENGAVLKYVTDVVTKEVPIEVPVVANGTMSVETTDDAVEATLVDSDGNPIENATVTAVIDGEEQNFTTDADGKVSIPVGENATVELSYTDPENGAVVKYSTKVVTKEVEVPVDVPVVANGTLTVETTDDAIVATLVDSDGKPIANATIIAVVDGEEMEIPTDEDGKCSVLITGNNTVEFSYTDPANNATVSYSTKVVTEVEEVIVPVPVVANATISLSTEDGSSIVATLKDLDGNAIANATLDANVNGEETKLTTDANGIATIPVSANTTAVVSYTDSNKATVTSSMSLTVIETIVEINKTIEVPPVRNASQIVCEDMNTIAVAKDDGRIGEYFYVKLVDANGNALVNKSVQIGFNGRVYNRTTNETGDVKLQINLAYKGTYTFAIAYLGDDNYNGSFVVSKITVKQQSPKITTTSKTYKASAKTKALTATFKTANGNLIADKTIKFTVNGKTYSGKTNAKGVATVKVSLNTKGTYSFTAKYAGDDTFKATSASGKLTIK

SEQ ID NO: 16809 - DNA, 1500 bp, unidentified
  source 1..1500: mol_type = unassigned DNA; note = non-methanobrevibacter Methanogen
atgaaggcgatcgttgccacggctctcaccttcgctctaataatcggcatgaccgtgttcttcatgagcatcgacgaattcgaccaatcgtccgccgaacccccgctgggtctttccagcaccaagatcaccctcgaggaaggtgacagttccgacctcacggtctggagtcttccgtcgggtacgacatacgataacatctcctgggagtccgataccgaggatgtagctaccgtgagttacggtaccgttaccgccgtgagtcccgggaccgccatgattacggcgagtgtctacagcggcggtgtcgagtacacggatacatgtctcgtcactgttaccgataccgctgtcgtgagtgctctgacagtctacaatccctattcggagaaatacgacagtgcggtcctttccggcaagggtttcctcggcgaagaatcaactgggggcgtgctttccctcggattcaaccgcggcggttacatcataatctccgtagcggggagcacatacagctggggagagagcctcaactccgtgggcgtggaggtccgcaactattcccgtattgtcatgaggctcacttcagtttccggtgtttatgcgacctacaatccttcgtcatccgtttcccaatccacattcgtcacgaccagcggtatcacatacaacagtgtcgcccaatccccttcgctgtacctgaaaggtctggattacggcacatacaatgtccagttcaccgtttacaaggacgggtttctcagcagtactgagatagtgtcggtgacaggtacgttcacctattccgaaggagatggaagatacgatacctcttcagaattcaccaggttctatgcctggaacagcgatatcaccggaagtagcgagctgtgcggcatcaaggtgacctacagctatgcggactattggaacgcagttcttcagagcaaggaagagatgatccactacagcaacggcatagcaagtgccagatacgaatccgaatgcgtggattatgtcaatacggggaccgcggtgaagagtctcgaagccgctctcagggaggaattcgaatccacctattcttcttatacagacaaaagcgagatgtacgcgcagttcatattcacgttccttcagatccgcttcttctacgagaacgactacacccaatactacgactgctacagctcccattcctcgggaacggatgtgtgggcatatcccgagatgaccatctattcgggcatgggggactgcgaggatacagccgctttgctatcctcactgttcaaagcggccggttacgatactgctctcatcatcctgcccagccacatgatgagtgcgttggtcctttcggattattcctacaccgcatcgttcgaatacgggaacaagaaatactacttctgcgagagtaccgccgattcgggagtgaggatcggttattgctcctccacctaccaatacggcgagttctcctactatttcgtgtga

SEQ ID NO: 16810 - DNA, 1443 bp, unidentified
  source 1..1443: mol_type = unassigned DNA; note = non-methanobrevibacter Methanogen
atggtggacaattcctggattagtagggaccgtgtttcgacggatgctggaaaccgtatcattcgcgtaaaggtgttactaaccatcgcggtcatattaatcgggggatgtacgacttttcttatacatggtttgggagcaaatgcgacccaataccaatctgagggagtcgttatagatttcgggaattacaaaactgtttggacaaacatcagtttcagcgagacagacgatccggtcgaattgctgaataaggcctgcgattcccactacagtacaacgcctatcttcacagatggggttctgaccggtatagatgatggagaaaccgtgacttccaacgatgcccagcatacctgggacctttggtacatcgagaaaggcaagtacgattatgtgaagagcgacacctattcaataaacgcatccgattacaccctgatttcatgggcatataccgaaacggatggtaaacccaccatcggcgtggatgctaccgcaacttcgatctacggttattccatgcctcattccctagtaaccctgtcccccgtatgtactgaattggttggtgccatggatgctgcagatatcatcatcggtacggacgactccagcaattatccatcaatcatagctaaggggaaggcagagcatacgattgatgttgtaggaacatatacggatcctagttacgaagctattctgcatgctcatgctgacatggtattctgcgatgcttcagcatattctcatgtaaccgtggcgagttctttgcggaattccaatgtcaattccgtggttatctatgatggggccgacctcgagaccgttctcaataacatattcatcgtgggaactgcgatgaattacgaattgcgtgcagcatatctggcctcacagatcgacatcgcactcgatacccttatcgcactaaccaatgcgaacgagggatacaagaccctcgttacgctgagttcagacccctctccgttcattgcgggtacagggacctatgtgaacgatatgctgtacaaaatgaatggttctaatgccatcaacgatcctgtatggccaagcaaaacacctaagactggatggcgtaacgtaactccatccataataatggacacgaacccctcttgcataatcatattcgattatgggaaatatcccgttggtagctatgatgagatgcttaatgctttatccgatgagtggaagaacacggatgcttataccaacggcaaaatctaccttttcgctgacggactaggggagatggcacagcgttccggcccgaggatcgcacagttgaccgaactcgtggccaggatcgtcaaccctgatgcgtttacggatggtgtcgtaatccccaacgccatcggtgatgactatcaggactatctgaaatatacaagccatttgggattcggtgagtga

SEQ ID NO: 16811 - DNA, 1410 bp, unidentified
  source 1..1410: mol_type = unassigned DNA; note = non-methanobrevibacter Methanogen
atgactgatctcaaccgccgttcgttcctcgcggcctccgccgcgctcgccggtgccgccgtagtgccctcggccgaagccgcgacctacagcccctgcacccgcatgccccgcaagtggaacgagaccttcgacgtgatcgtcgtgggctcgggcttcgccgggctcgcggccgctgccgaagcgaaactttccggcgcgaaacgcgtggttgtgcttgaaaagatgccgctccccggcggtaactcgaagatcaacggcggcattctcgccgttccgggaaacccggtccagaaggcgaaggggatccaggactccgccgcgaagctcgccgaggacatcaaagcgctcgttcaggtcactgaggacgacgagaccctcgtcgaagtgaagaacgacggaaagctgctcaccattatcgttcccgaggacaggctggccgccggtgtcgagtacaccaccggattcaccgttgtctgcgctgccgtcactgaggccatcatcgacaggtacaacgtgccgatgtacaaggccaacatggtgaaggccgccgtctggggcaaatacccgcagaccgtgaacttcgtcggagccaacgtcaaatccatcctcgagcccccgcagatgaacgagggtgccggattcgccctgaggaacatcatggcgaaccacgtcgttgctctcgtccagaggaacgccatgcagggcgccgcgctctcctcgatcttcgagacctgcgccgcctacgagatgggagacgccgtcgggcccttcgagaggcagcacctgctcgccctcgcctaccagggactgaacgccaacaacctcgtctactccctcgttaagaagaacgggaagaccggaaccgtcggaaccgttatcgcctccctcatggagagggcaatcgacgacggagtcatccgcgtgaaagagaccctcccgtccggatacaagatgtacaccaccgatgaccttcccatgtggaacgcctacgccgcggccggagaggtcgccgccgtcatggtcaacgtcggtgctgcccgtgcggcccagggaataccctccactgttctgtactacaacgaccttctcgagcacgagtcctcgctccccggagtcgactacggccgtgctgagggtgtcggtgtcggaatgtccttcttctctcactccatctacggaggcggaggacccggactgttccacggaaaccacgtcgttaccaggcacgccaagggaaccctcatccccgctgtcaccgcaggaaactgcctcgatggcggaacccagaccttctctgctgaggccacttccggtctcttcaaggatgtcttcggaggaatgcccgagttcaacactccgatgcagttcgtcggagccgaggccaagaagatcaggaacaagatctga

SEQ ID NO: 16812 - DNA, 1371 bp, unidentified
  source 1..1371: mol_type = unassigned DNA; note = non-methanobrevibacter Methanogen
atgaagatcggcatcaagctgatgaccgtgctggcagtcctgctggcgatcaatatctccggcgcggccgccatcgccggaatgatgggaggggacggaaacagcggaggcacatcgagcgccagcggggaatcgaggctctgggtattcggcaatgcgaaccaggacgacaggatcgatgaaaccgacatcgattacctgaacggcgtgctggacgggacatacgaggagaacaggctctgcgatgccaataacgacggcgtcgtggattccaaggacgcggattacataagcaggatcatcgcggccgcggagaacgggacagacgagatcaccgtgtggtacatcgacagctacctgaaggtcgcatccgtcgattggccggtgaactcgatcgccatcggctactgcagcggggcgtacgcagcggacatcgcgcacctgtgctccaaagtgacgatggtggacaataccatcaagaactactggtcgggcatgaactcgcatttcgcttccgccgaatcgttcggcaccactgaggaccccgatacagaggcgatgatgaaggcgggcatcgatgtctatgtggtcggttactgcgacgagaacgcggaccagctaacgccttccaagctgaatcccgccggcatcgacgtcatgttcctgacgaccgcggacaacagcggcatcgacgagcccaacgagtacatcgaccgttcgttcctgatattcgcctatcttctccagggggacatggacaatgcctatgcctaccttgcatggcatgacagggtcctgagcgccctcgaagatgcgggatcctccgttacggatgatgagaaagcatcgttcgtcatggccaggtcgtccttccaatatcagaagtccacgatatccgtcaccgggtacaacaacaccaataacatccatgccgaatgggtcggagtctacgcggccggccagcacagctcggtcctgtcgaagaactacaactccctgaccgaggagcaggtactggaggtggtatcgtccgagaagagcgcatccggatacatctattacatggacaatgagcacgacggcatgaggcagcagcacacgctggaagaatgccttgccgccgatgccgagatgctctcagaggccgatgcgtacgtccatctcctgggcatggcccgcgaagcagggaactctccgatgtacgtggttgagctggcattctaccagaacgtcatgtacccggagctctactcgggggtcaattggaagagcctcttctgggagtacttcaccttctcagaagaggattacacgagtatcatcgatatcgaccgtttcttctacgattacggagtcgtcacaaaggcctga

SEQ ID NO: 16813 - DNA, 1281 bp, unidentified
  source 1..1281: mol_type = unassigned DNA; note = non-methanobrevibacter Methanogen
atgaactcctacgccaaggccctactcctcatagcggtatcagccttggctctctcggtactcgcgtcccccgggacctcggcggaggatacctcgtggaccgacgtcgattccgagagcggactgaccgaagccctgaacggcggagcgaagaacatccgcatcgtctccgacatcacggtgaccggggacctgaacatcccggccggggtcagggtcctcatcccctacggggcggacgacatctccggactgaaggtagggggagagacgttcaggatcgccgggagcagctacgtccacctcaccgtgaccctcagcgggaacctggtcgtcggcggagagctgatcatcggagggaccataggcaacagcaataccttctcctaccagggacacacctccgcaggccattcggtgctggtgaacaacggatccatcgcggtgaagtccggcggctccgtgagctgcttcggattcgtcaggggctccggggagatcgtggcggagagcggttcgacggtcaccgagcccgtcgtcatcacggactacaccggcggcgacaacctgatgagcagccacaacgccaaccaggccatcttcaaccgctacagcatctccaacatcaggtgccccctgcagatcgaccacggagcgacccttctcgggaaggtggccatcagcgtctccggcatgatacacgagaaccaggttacctacatcggggagacagccaccttcatcagactgtcggaaggcgcaagtgccagactcacctacagtgcatccccgtcgatagagagcagcgagagcctcggactccattcggacatcgggaagaccactgtcaccataaccgggggcgccaccttcgaggcgatggagatcctcgtgaacaacgacttcatcaacgcgagatactccttcgccgagcaccccttccccctcccctacaccacggtcctggagaacgggaactacctgatgaacgaggacttccgcatcctccccggagccaagctgaccgtgggggccgacgccacgctcgcggtgaacaactccctctccgtgctctggggcctggaggacaagacctacaaggacggcgtgcgcgtcgatatgaagtacccctccacctcgacgctgggttccagcgggttcgacaagtccggaaggctgatcgtgaacggcagcctcatcctgctggataacgcggatttcagcggtatcgcggagatggggagcgcctccgcctcgataaccacctccaagcgtacggac

SEQ ID NO: 16814 - DNA, 1206 bp, unidentified
  source 1..1206: mol_type = unassigned DNA; note = non-methanobrevibacter Methanogen
atgattggcttgatttgtctgtcgccgttctttttatatattttcctgatacgatattggactatacatccaagtgatttcatggaaaagaaaatactggcaatcgcggccgtggcggtagtgatcatcgccggtgccgccgcagccgtcgtcctcaccgatgatgatggctcgtccgacagcaagaagggattctattcgtgggacccgaccgtcgtcgaggtgaacggcgactactccaactgcactccctacttcatgaccatagccgagaccgtttacgagaaggtctacggcgacgttccggaatacagcggcatcgcccgctcagacataccctcggagtacctctactcctacgacagttacgtgaccgcctccacagaggacaccatcactgtcaagaccttcgacaacaccagcaccggcacctcctctgcttacctggagaagaccgtgaacagcagtcccgtcaaggtcatctgctacaccgatgcttacatcgacaccatctacatgatcctctgcaacaaatacggggagaccgcccactcagggaacaccccgcaggcagacgaagctctctgggacctcatccctgccatgacctcgagcgtcaagagcggccttgaaagcaagttcggcctcaccgtcccggcatccgtcacgatcctcggtaccggccaggaggaccttgtcaactactgcagcgagcactctgatacccagacgatcgtcttcatgtccgagtacaatatccgcgccaccaacaagaacagctggtgggacaactgccaggccatcgaatccaacacctccgggaacatccagttcatcttcaccctttccaactctccggccatggtcctctcgaccatcgagatgatcggcaaggtcatcggctcggacaacaccgacgccatgatgacctccatcctcgccgagatatacgtcatgcagaaagccatagacggatccgggaaagagatcagcttctactgcgagaccgccagcgggaacagcgtcggctccaacaccctcatgggcgggatcttcagcagcatcctcaagatggagaacgtcttcgacggcagcctcatgggaagcaagatgagcgacgagcagatcatctccgccgaacctgacgtcatcggcttctacaccagcgacacacgctcgatggacgagaagatgcgcgcggcctga

SEQ ID NO: 16815 - DNA, 1188 bp, unidentified
  source 1..1188: mol_type = unassigned DNA; note = non-methanobrevibacter Methanogen
atgggcgggaaaggcaggagatgctccgaagatgcagagtatgataatatgaatgcgaagaaactagcgatcctgtctgcgatcgccgcgctggcgatggttttcgccgcggctgcggtcgtacagggctctgaggattcagctgcagatgatgcataccagaccctcgttgtgggcgacggggacggagagtatgcgaccatcgcagccgctctcgagaaagcaaggaatggagaccacatacagcttgccaaagacgtcgaagaagacgtaacgatcgctgctggcaatgtggtcctcgacctcaacggccacaagctgaccaatgtttcgtccgatacgatcaccgtcgcgctcggggccgagcttatcatcacggacagctccgatggcaaagggaccgtggacaacgtcaccgacggcaaggccgctgtgttcaacaacggcaccgtcacgatccagaacggcaaattcatccgctccctcgagaccggggtctctcccaaagaaaaaggagacaacagtttctacaccgtcctcaaccatgggattatgaccgtcgagaacggaaccttcgagaacagcggaaagttctccagtctattcgagaacggctactatacttatgccagcaccgattccaggagcggttatgtcgagagcaccaaccagaccgcgccctcgctgacaatcaacggcggttcgttctccggcggagtcaacgcaatcaagaacgatgacggaggagtcctcgagattaccggcggcaccttcgagaacgtgacgcagttctgcgtcatgacctactcgaacgcctctatcaccggaggaacctacaagatctccgattcggcctcggcagccatctactgcaagggcgacaagaccgctcccaccgacctcggcaagctggggatctccggaaacctcggtaagatcatactggcgaacgacgccgacgttaccctctcgggagacgtcactaccgatgtgatcgtatgcggcagcggcgccgccaccatcgacctgaacggccacaagctgaccaacgcctccgatgacaccatcacagtggcgctcggggccagccttactatcactgggaacggcaccgtcgacaacctcaccaacgggaaggccgacgtcttcaacaacggcaccgtcgtcatcgagaacggcaagttcacc

SEQ ID NO: 16816 - DNA, 1131 bp, unidentified
  source 1..1131: mol_type = unassigned DNA; note = non-methanobrevibacter Methanogen
atgaagactctgttcaaatatatcaccatgatggcattgcccgtttttgcccttgcctcctgccagagcaatgacgatgacgatttcgacaacaaggctgccatcaacgcctcctccatggtggcggagaccatagtcaagggtagcgtcaactctgccacaaagacccttgagctcattacgccgcgcccggtggagcaggaggttaaagcctctttccgtgcggcacctgagttggtgggccgctacaaccaggcctattacacttcggccgtgctgctgcccgacacctgctatgcgtggcaggagaacaatgtcgtcatcaatccgggtagcgtgaagagtacgtcggccgtcatcgatttccaaaagcttggaagtctgagccgcgactctgtctatgtgctgcctgttacggcgcagacgcctgggctggagctgctgcagtcgaagagtacctattatttcgtcttccgcgccggtgccctcatcaatgtggtgcctgacatggaaaagaacaatatccgcattgactggaaaaatacggcgatgatcaacagcatgtcgcagttgacctttgaggctcttatccgtgcccgcgacttcgaccgcctcatctccaccgtgatgggtatcgagggctatttcctcatgcgtattggagacgccggtgtgccaagcaaccagattcagattgccaccagcaacggcaacctcaccaacagcgaccttcagttgcagaccaacaagtggtaccacctcgccctgacctacgattcttctaccggcaccatccaggtttatgtcaatggccgcaagatgctcgagggcacaaaatatctcggacgcatcaacctgaccgatggcgatttctatatcggacgctcctacgaggacagccgctatctcgccggcaacatcagcgaggtgcgcatctggaacgtcgtacgcacgcaggaggagattgccgccaatccctattacgttgaccccgcctcagagggcctcgtggcttactggaagctcgacgacatgtcaaccaacgtcgtaaaggactacaccatgtacggcaacgacggtaccgccaagaacacgctttcgtggcaaaacgtatcgctgcctgagaaataa

SEQ ID NO: 16817 - DNA, 1095 bp, unidentified
  source 1..1095: mol_type = unassigned DNA; note = non-methanobrevibacter Methanogen
atgaaagttaggaatgcgttactgttaacagctttagcagtgctgttaacagcgaccgtattgacaatagaatcagaaaatgaaggatcggaagacaccgaccagttggtaagacaagatgtcgatgacggatcatatctgcttctcggaggtgccttcaatccggaaaaggatatgacgaacatcgaagttagcaacaatgtaatttcggctcatttcaatttgagtggatattccgaatataactggacaataatcgatgaagataaaccccgttctacttctacaaccagtttctgcgaatatacgggagacgaaatcactactaccactccggatttgacattatccactccgggttacggagactatcagatcatcctttcagtcgatgacgaggaattcagcggagagatcgtactgatatctactttgacaaagaattatgaattcgaattcgacaatgaaaattgccagataacgtttgagatttcctatgaagaatattatgaaaccagaaagatagattcaaacagatctccgactgatgatagatacagcgactttgtcacagaagatgattcagtatcccaaatagcggatgaaatattggcgatttccgatggcaatgccgatgatgccgccgccatcgcattgtcctttgtccagctgttcatcgcttacccgccatgcaccctcgatggaaacggatccttcataatgagccccgacatgtacctggttgggaaggagaactacgcattctaccccatagaaacattattcttggaaacgggagattgcgaagatacttcgatactttacgcttcgatcttgaaagcgatgaacatcgagacaggattgctgttgatgcccgggcacatgatggcattggccgaattgaccggaggagacccggaaaacagcaattccagcctctccttatacaagacgagtgtagatgacagaacatattacgtttgtgaaacatcgtcatcccaaacgattccggtagggtacgcgtatgaatctgtcacgtttggaggcaatgacattcaatattatttgaatagcaattatatcgaatttatctaa

SEQ ID NO: 16818 - DNA, 1086 bp, unidentified
  source 1..1086: mol_type = unassigned DNA; note = non-methanobrevibacter Methanogen
aaaggtatgcttcaaatcaggaagaactatgctcctctcaagggcacaggcttctcaactccgaccttcacatcctcttacggatatgtaatcggctacacctacagcaacagcacctcaggtcagtggaacaagctggcggttctggttaactccaacgcaagcgcttcctacacaatcaacctgggcagctcaaactggacgatcgtcggcaacaacaccaccgcaggcgttaagtcacttggtacagtaagcggctcaagctacacgatccccgcaagaagcgttgctgttctggttgataccgcaagcttcaataacctcaagctcaacgaaagcttcggtactcttaccgttaagcatgttgacaacaagggcaacgtgctcaagacaagcacagccaagtacagagcaggcagcacataccgtgcgcttcccgacacaacactgctctacgactacaacctcaccaagaccgagggcacaacaacaggtacagtggcggcaaacggcaactacaccgtaaccttcacatacaccgacagcggcgtagcttcaggctacctcaacgtaaactatgttgaccagagcggaaaggcaatcaaagacgccaaggcacccgtcggactgatggatgtcgtctccctccccaagagcggagccaactaccgtgtccttctgaccagcaagggaaagctgaccctcgtccccatcaacgcggacgaagccaggtggatcctctgcaggatcgagaacaagaccaaggtagcaggcggaaagattcagctcaacctgtccggcggaaggaacatcctcgtcgacgagaacaagtacagcaccggtgacagcgtgaagctctgcctcgagaacaacaagatcgtcgcagactaccccctcgccgagaacgcagtcgtgctcgtcatctccggacgccacatcggcgccatcgagaccgtcgacaagtacaccgtcgtcaacaggcccaccgagaacaccatcaccttcaaggacaacaccgagaccgtgaagaagaacgtcttcgtcatcggcagcggcaagtctgagctcccggaggtctctgaatga

SEQ ID NO: 16819 - DNA, 1038 bp, unidentified
  source 1..1038: mol_type = unassigned DNA; note = non-methanobrevibacter Methanogen
atgagcttcggctcgcatatcggcaggaagagagcggccgaggctgccgtcgtcattgcgatctgcgccgtgatcttcatcggagaggcatatgcctatcttcctgacgactacggttacgggtcctcggtgtcggatgccggagattatgcagaatataccgtgacagtgaacggttcgcacgagtatgctgcgtccctgatctcctgcggagattatgtcccggtgtcatcagtataccttttcctcgaggaagggcgcacgtcccagtacagcgacggcagcgacctgttcctgtcccgcatggacgagcccgggttctatctggaacaaaccgagaccgctctcagagtatgcgggatcgatgatactgtctatatggacatggacggcctcgccgaggcgctgcagtccgacatatatgaggggaccgctgccggcaagggcctggtgatggtgtacggggcattcccgataacggtctacgacgggtcctccggcgggacggccctggaatggatggaagcgggcggcaccgtctattgggtagggccggcccccggcgattacgtgatggcccgcgatgggtacgaatacgccggcgggagggccttcttcaccggaacggccgaatatcttgccgaagacgatccggcggataccgaggggccgttcagaaaggagctgcagctcaagggcgatcttctgatgaacgcccccgacatgtccgggacagggatggaatctctcacggccggatatacgtccgggaacagagggaccctgacattcgtgagggaaggctccggacagatatgcatcgctgcaggcggggtctccctcttccaggcggaggatatcgcctcttctgcctcggccggcctgtgctggtgcagtgttctcttggatacctgctcgggcacggcgcacgggagcgattccgggacgctggacaagaacggggcctcgggcacgctctgtgtctacgtgaccgtcggcgatgcctaccagatatacgcgtgccggcatcagatctga

SEQ ID NO: 16820 - DNA, 1023 bp, unidentified
  source 1..1023: mol_type = unassigned DNA; note = non-methanobrevibacter Methanogen
atggataaacgcgattacgggctgataattctggctgtggcggtatgcgctgtcgtcctggtcggggagttcgccacctacggcaacatctacaggtacgactcctccgccgacgcgtccgggaacttctccgtctacgattcgggctcgcactgctacaccgcggtcctgtccgataacggcagcttccaggcccccaccaggttctacgtctattacgacgagggctacggcagcgtggtacacgacgctaaggtcgaggtcggtgccaaggcgctcgatcagaagtactacctcagtcagctggtcaacaatctgaagtactactcggtcaccgacgtgacctatgtcaacgccgcggagctggcgtccaagatgtccgaggccgggaccggcgtgggactcatcatgatatccggtgccatccccgagacggtctacagcggggctgcgggatgttcaatcctcacatggatcgcatcaggcggatcgctttactgggccggcgaggcgatcgggaagtacatcgggaaggcggacggaacgacctccgaggtcaccggttacgaggcactgttcctcggcgccggcaccctgaaccccgagaccggggacacccgcgccctgaacgatgtcgcggccaacagctaccgcagggacctctccctcaagaacaacgacgtgaggtatgcggtcaacatcgcctccgcaggtgccgattcattggccgtcggatacgagaaggacggatgtgccagcaccgtcctggtgaagaacggtgcgggaatggtgtgcgtcatgggaggcaactactccaacaaccagcgcatggacatggccaacatcatagcatccggaatctgctactgctccgccgagctcgactgcaagaccggaaacgtcgcccgcggcaccgtgaccggtaccttcagcaattggcccgccaccggcaacgtcgcagcgttcctgtacctgggaggcgacttctcggtctatggtaagctgttcacgatgaccctgtga

SEQ ID NO: 16821 - DNA, 1008 bp, unidentified
  source 1..1008: mol_type = unassigned DNA; note = non-methanobrevibacter Methanogen
atgtctgccaacagccacaacagaacgattgccgtcctcgcagtgttcggtctggtcttctcaggcatcaccttcatcggtaccagtgacgaatccgctgcggagaatgtctccgccactctttacattgtacctttaggaaacgaacaggccagcacatgggaccaagtgcagacatttcccagtgctctatccaaaacctatgtttgtaactacggttcgaccgtgaatatagatatctggcccagtgccggccctggtttcaacggagctgcattctcgttcacccagaccaacacgtccagcggactgtctctcagtaccaccatggagaagacctcccccatgggaacgggcacaaaagtgctgcacatcaccggaaccgcactcgacaacacctcggtcagggtctacaacaagacctccatgacaggttcctacgaggcattcatcaacttcaatgtgacgatgccttcctacacccacaccgtgacctactcggccaacggcggtaacggatccaccgagagcacggtcgtgaccgacagcaacaacggcaacaccgacgtcaccctggccgacagcggcttctccagggcgggttacaacttcgcgggatggaagataggcaatacaatctaccagcctggacagttcgtccccgtcgctgccgatacctcagtatcggcggtcgcccagtggacccccatccccgttaccatcacctcttccgccgagcaggcggacatcgtggtgggggactccttcgtcaggatgatcaccaccgatccctcgggagccacgctctcagtgagcggtgtgtcatgggtcacactgagcggatccacgctcgtgggtactcccacccaggccggtgattacacggtgacggtgaccgcatccaacgagagttcgtccgattcgcagaccatcgtcatccatgtggtgaaccgtctcgccttcgagagcgtccccaccggagggatccttgcaacgccggtgatatga

SEQ ID NO: 16822 - DNA, 1002 bp, unidentified
  source 1..1002: mol_type = unassigned DNA; note = non-methanobrevibacter Methanogen
gaatactacaagagtaacagcacctatcttgatgccttggctgagggcggcttctcgccaagcatcttacagattagcgcctttgccaacaagaaggatgcaagtggctatgagtcagcttacaatgtagagggtttcttcggcaatgctcagtacaactacgacaacaagtacttcggctcattctcttatcgtcgtgatgcttcttcacgctttgccaaggagaaccgttggggtagcttctggtcagtaggcgctgcttggctgatcaacaaggaggcttggtttaatgctccttgggtagacgagttgaagttgaaggcttctatcggtcagcagggtaacgataacatcggcaactgggcttacaccgacctctataccttgtctcaggtttcagatacagagatgtctgcatctttcgcacgcttgggtaacaagaatatcacttgggaaactaccaccaacttcaacattggtacagagttcagtttcttcaagggtcgcttgagtggtagcttcgacttctataccaagaagactaccgacttgctcttctggttgcgtgtaccagagtcacagggtactcgtggctactatagcaatgtgggcgatctccgcaacacgggtgtcgagttgaccttgacaggtcacattttccgcaccaaggatttcgactggtcagttacagcaaacttggcacacaacaagaccgaaatattgaagcttgactctacttcaaagaaccagtttggtggtttctcacaggcaagtgacatgagctacaccatgtattggtacaaggagggtggacctctctacaatggtttcctgcctaagtatgctggtgtcaacgaaaagggtgaggcgctctattgggtagatgaggatatctcagacagtgaaagaacaggtcgccctgcccctcgacaagaagatcgctgtcgggaagcccgcgtccatgaccgacctgaagaagaggaccaccatcttcagggctga

SEQ ID NO: 16823 - DNA, 993 bp, unidentified
  source 1..993: mol_type = unassigned DNA; note = non-methanobrevibacter Methanogen
ctgaaccagatcggaatcggagccctgaagaaggagctttatgcgggacacggtatctccgtcgcctaccacacacccgtaggtgacgagaacttctacaaccccgagaccgccggccaatacgccaacgccctgctcgggaccaaccaccttgtgcaattggtgggatggaatgatgatgtgccagcaaccattttcaatacccgtgctcccggtaacggggcctggttatgcaagaacagctggggctcggaaaccgacagttacaccaaggacggagtcggctacgctaagagcacctacggaatcaagaactccgaaggaaaagcgacaggttacttctggatctcctactatgaccagaccatgaggggcgtggagagcctttccttcctcaccggattcggagacgagaacggattccagacctacaggcacgacaacatgcccgcttacgccggcacatacgtcggaggatacgaacaggaagccagctgtgcgaacgtgttcagtgctgcctcgaacgagatcctgaaggcggtttccgtaaggtcctctgcctacagctccgagatgaacatcaagatctacctcctcggagataacaccgcccccggtgcgggaaccctggtctatgaccacgacatgttcttccagttcgctggctaccacaccgtcctgctggacaaggacatcgccctagaagcaggaaagaggttcgcgatagtgaccactgagaagatcgataacgacggccagactatctacgcgtacaacgtcaacaccgcacccagcgaggagaaggccaaggccccgaacagcacctccaacgtctacggaatggcatacatcggagagggagagagtttcataaactacggtgaaggctggacagacctttcgatccccgagatgcacgctgcgattgccgagaagttccccggcgatgtgttcgacaacttcagtatcaaggcgttcaccgttctcgcctga

SEQ ID NO: 16824 - DNA, 1344 bp, unidentified
  source 1..1344: mol_type = unassigned DNA; note = non-methanobrevibacter Methanogen
gcccaggtcgtctacggatccttcggggacaagcacctgtacgctcagtggacggctcacgtgtactccctgacccttaccagcaccggagcatccgacggaagcgccaccgtgacctacctttccgacgagatcgcgtatctggtggatgcgaaggtcaccggatacaacgtcgtcggttacaacaccgagggcggtgtgctggtcatcgatgacgagaggcacctcgtggcctccgtggagggttacaccgacgccgacggaaggtggatcagggcacaggacaccgttctgacacccgcgaccgtgatccaggtgcacacgctgaccatcaactacgagttctccgcaggaggaaccgcggctgagcagtacgtgggacagttcgagtacggacaggcctacgacatcacctctcccgctgtcaccggatacacccccggcgatgccaagataaccggtaccatgggcgaagccaatgtcgagaaggcggtgctctacaccgtcaaccagtacaccatcaccttcagcggcaacggaggttcccctgcgggtgtcgtgcaggaactggattacggtgcgcccgtagtcgctcctgacgaccctgagagggaaggattcgtgttcaagggatgggaacctgccgtccccgcgaccatgcctgctgaaaacatcaccgtgaacgcagtatggtccgccaagccctcctctccctccgcagaggtcatagagatcgctgattcgcaggcggaaacggtcgtcatcgacttatccgtccctgcggtcgtcgaggccctaaacaacggctccaagaccgaggtagacctcaagggagacggatggaccatggagatccccaagtccgtcatcaccggcgccaccggaaacgtctctgcatccgcgaagaccctctccgacgatgccaaggcggccctgcctgaggaggcgaagaagctcgtcgagggcaagactgtgttctcgctgaacctctctgacagcaacggtgccgtcagcttcagcggaagcaagatcaaggtctccctgccctacgctctgaaggacggcgagaacgcggaccgtatctgcatgtactacatcgatgcggagaacaaggcggttagggtcgatgccacctacgacagtgccagcatgtgcgttgtgttcgagaccgaccacttctccacctggttcgtggacttcgacgcacccgcttccagcggaggaggtaacaacaccatgatcatcgtgggagtggtgatagccatcgccgcggtgctcggaatcttcggatacctcatcatgaccggaaagctgcagctcggagccctcggcaagaagcagtga

SEQ ID NO: 16825 - DNA, 1116 bp, unidentified
  source 1..1116: mol_type = unassigned DNA; note = non-methanobrevibacter Methanogen
atgaactacactaaaaaatcatatttggtcatcgcacccctcgcaatcatcaccatgattgtgtcagtcatccccgcaggactctcggacagctcggatgctgcttcaatcaccatcaccgacggatacgggaccgtgttctcgttcgatgacgaacctgcccatgtaatcaccgtcggcaaaggaataacctccacagtcattcaactgagcggtatcgacaagattgtcgttgccgacagttattccaagagcgatactgaccctgtctttgacatcctcaggcaatatgttaccgacggcaaaataaccgccggaggaaacatctactccagcggaaagtcccagctccagactgaaattatcaatgcagccgacactgcccacggaggagtcttcaacaaggagactgaccccgtcatcatcaccggcggaaacagctacatcacccccatcaaggattatctggtctccaacggattccagaagatcctcctttggaatgacataacagaatactccaagattcctgacttcgtaagcaccatctctaaaatcctcaccggttccgaatccgacaaggtcgcacagatgagacacgtctcggatgtaatcgcatccggtgtggaaggccacgaaaaagcggaagcgttctatgtcacatactccggaagcgtgttcaaggtaggcaacaccaactccctcgcaaactccatgatcggcgcagcgggcggaacctccatcaccaccgatgacggtaaagcaaagcccacttacgaggcaagcctcaccagtctcgtggagtctcatcccaaggcagtgatattcatcgatcagtccatcaacggcaacgaaagcagactcaacgacctgaagacccaggtaggtgataacgctaagatcgttcctctgaaagcactctggaacaactacagtatcgagagcatgaacggcgtatggaccatggcctgcgccatgtaccccgacctcttcagcggcgaagtccccacagttccagccaaacatgagaacaacaccctcctttacttcggagtgggtatggcggcagccatcataatcgccggagtaggattcatgttcctccgcaggcactga

SEQ ID NO: 16826 - DNA, 957 bp, unidentified
  source 1..957: mol_type = unassigned DNA; note = non-methanobrevibacter Methanogen
atggccgatgaagaggacgtgaaaccgaggaaagagcgcgagcccatttccctggtctgcctgattgtcattgtcgttgcgaccatcgcggtcgtcggtgcatacgtcaatgaccacatgatcaacgatgggaacgatacggaggccgacaccggcagcactgtggtcactgactacaccctgtcgctgtacgactactatgacaacggcggcgcgatctaccagaccaccgtggagagcatagctgattcgacccagtgggtccactccgccggttatacagaagcgacgtcctacagcacattctcggtgaccatcgggtccgggagcgtcctccaggcgttcaacgatgccctctacggcgcgaaggaaggggacaagatccgcctggcaatcccgctcggcgaaggctacactgcttccagcaccacgaagtccgcatcgatgagcggcctcaccaccccgacgagcgtcacgatggctgcatccgagttcaccaacatgtactctgatgtctctgttccctccaacggggctgcaaccgccatcgagaagaccgttctcggatggagcggcatcgccactgccagcagtgatggcaaagtcactgtcacatacatgccgactgcgggagaggagtatactatcgtggaaggcagcttcggcactgtgaaggcaagtgtcagcactgtttcgggcggagttatcacattcagtctcgtgatctccaatacccagaccgtgaccgaccagtactccgacgatctcgacggtttcagcgagatcaagatgatcaagctcagcctctacaatgtgaccgccggcagcgatgttatctccgggaccgtttacatcaacggcctcaacagcggcaacggcgagttcagctacaggaccctggccgagaactacaacaccgtcctgtactacgtcatcaccgtcaagtcggtcagctga

SEQ ID NO: 16827 - DNA, 561 bp, unidentified
  source 1..561: mol_type = unassigned DNA; note = non-methanobrevibacter Methanogen
atgatcgataagaagatcatcgcaatcgcagccgttgcgatactcgttgtcgccggcatttctgcaataatgatcatcggcaacgatgatgaggattctaaggacagcacggacttcgcaggcaaggaactggaggtcgcggacaatctggacaacggcatcgtagccgtgggccaggattccttcagatggatgacctatttcggcctggcggacaaatgcgacgagccggtctgcagcctgtccggcgggcagaagcagcgcgtcgccatcgcgcgtgcgctcatgcgaaagccctcgctgctgctggcggacgagccggtcgcctcgctcgacccggtcaccggtcggcagatcctcgcgctgctgcaggacattcagcgcacggagggtgtcgccattctcatgaacagtcataatctcgaccagagccgggcggtttccacccggctccttggcctgcatgccgggcggatcgtgctcgacggcgcgcccgccgccgtgacggacgcagacctcgcgcggatctacggcggcgcggaaagcggggctgcgccatga

SEQ ID NO: 16828 - DNA, 993 bp, unidentified
  source 1..993: mol_type = unassigned DNA; note = non-methanobrevibacter Methanogen
gtggttcctatctcggaagccataatcgagcagctttcgaaatgcggggactatgattacgagctcctgttcatcgataacgattccagagataccaccagggacaagatctgcctcctctgcgcccagaaccctaagatcaaggcgatattcaacgccaagaactacggacagttcaactccccctactacgggatcctgcaggccactggcgactgcgtgatcagcatggcggccgatttccaggaccctccggagctcatcccgcagtatgtggaagcgtgggaggagggatacaagctcgtgatgtgccagaagacctccagcaaagagagccgcctggtctacagggcccgccgttcatattaccgcttcatgaggaagcattcgagcgtggagtggctggagcaggtcaacggctcggggctctacgaccgcgagttcgtggagatcatgcgtaagatcgacgatcccaagccgttcctcaggggcgtcgtggccgagatgggctacaagatcaagctcatcccgttcgagcagccgaagcgcagggccggcaagtccagcaacaatctcttcagctactatgacggcgcgatgcagagcatcacatcatacacgaagtacccagtccggctggccgccggtctagggttggggctcacggccgtgagtgccgttgcatgggcagttgcgatcatcaacaaaatcctcaattgggattcctacgccttcacagatgatgttctggcacttgcgatattctcggcggtttctctcaatctgttcttcatcgggatggtcggggagtatgtgatgaacgtcaacgacagggtgaggaagcgccccctggtcgtcgaggccgagcgcatcaacttcggcagggagcgaatcagagaagaccgagtatatcgcggggggtgcgcgcgaagcggtgcccagcagggacatcttcggccgaacggtatccgaatccgtaaaggacggcgatga

SEQ ID NO: 16829 - DNA, 942 bp, unidentified
  source 1..942: mol_type = unassigned DNA; note = non-methanobrevibacter Methanogen
atcaccgaaggccatccggaagtgactgatattgttccgctgaatatgactgaaaacgaactgctggcactaaccgcttcggcagagttcggatcgcagcaccccatcgccaaggccatcgtcagaagcgctgaggaaaggggcatggaaatcgcatctgtatccggattcgacaccgtggtcggaaagggaattgtctgcaccgtgaacggcagaaaggtcgcagtgggcaatgcctctctcatggaggaggtcggtacggacatctccgccgctgctgaacactacaattcgctcaccgcagaggccaagacctgcatgttcgtctctgcggacggaaccatcgcaggaatcgtggcggtagctgacccgctcagacccacctcatcagaggctgtttcactcatcaaatcgatgggtgccatgccggtcatggtgaccggggacaacagacagaccgcggaggccgtggcacacgccgtcggtatcaatgaagtcaagtccgaagtccttccccaggacaagctggctatcgtgaagaagtaccagatcatgcagaagaccgtggccatggccggagacgggataaacgatgcccccgcactgacccaggccaatataggcatggcagcgggttacggcacagacatcgccataggcgcggcggacgtggtcctcatgaacagcgatccgagatcggtgcctgtcgctatggatatcggcaggaagacggtcaccaacatccgtcagaacctgttccttgccttcgtttacaatgcgatatgcatacccatcgcagcaggactcccgtaccttctgggtatgggggaattcagccacatgcccatgctggcggccgcggccatgtcctgctcctcggtatcggttaccctcaacgccctgaggatgtgcggatacagaccggcgttcgcgaatcagtga

SEQ ID NO: 16830 - DNA, 546 bp, unidentified
  source 1..546: mol_type = unassigned DNA; note = non-methanobrevibacter Methanogen
atgcatggaaagggactgacgtccgaagaggtcaaggagagggcatcgaaaggactctccaacgacaaggaggaacgtcagagcaggggctatttcgagatcttcgccaagaacctgctcacccctttcaacgtggtcctcttcatcctcggtatcgccctcctctatttccaggagctcaccagcgccatcgccgccaccggagtcatcatcttcaacgtcatcgtctccaccgcccaggaatggaaggccaaacgccgtctcgacaagatcgcggtgctcatgaggcccaaggtcagcgccctccgcgacggggagctgaaggtcatcgaccgttccgagatcgtcatggacgacatcctcttcctgggagcgggcgaccaggcacaggtcgacggggtcgtcgacgacgagaagtccctggagatggacgagtccctcctcaccggggagtccaagaccatccgcaagcacaagggcgaccaggtcttctccggctcctactgcgtcaccggcgagtgctggatgctcgtcactggcgtcggc

SEQ ID NO: 16831 - DNA, 333 bp, unidentified
  source 1..333: mol_type = unassigned DNA; note = non-methanobrevibacter Methanogen
atgggactcagcaagaatcagaaactctacatcggatgcttcgcggtcatcggagtcttctgcgtggccaccctggcattggctgacggcggattcggcggatcggacgatgccggaggagagtcggcagacaagtacggatatgaagcctggaccggggacatcctcacgatcatcaccggcgaccccgattacgagcttcccggcgagaccgaatccatgctcttcgcagtacaggccgccatcggagctatcatcatcggatacttcatcggatacaacgccgctgtcggcaaaaccctgaagaaatccgaggaagagaagaaggaatga

SEQ ID NO: 16832 - DNA, 330 bp, unidentified
  source 1..330: mol_type = unassigned DNA; note = non-methanobrevibacter Methanogen
atggcactcagcaacaaccagaaactgtacatcggatgcttcgccgtcatcatcgtgatgagcgtcgtgttcctcgcatgcgtcaacggcgacttcggaggttccgacgacgccggaggaggagtcgcggacgactacggatacgaggcatggaccggagatatcctcaccatcatcaccggcgaccccaactacgagctccccggagagaccgagtccctcctcttcgcagtccaggccgccatcggtgcgatcatcatcggttacttcatcggcttcaacgccggacagaagagagccggaaccggcaagaccgagaccgaacagtga

SEQ ID NO: 16833 - DNA, 1500 bp, synthetic construct
  source 1..1500: mol_type = other DNA
atgaaggcgatcgttgccacagctttaaccttcgctctgataatcggcatgactgtgttctttatgagcattgacgaatttgaccaatcgtccgccgagcccccgctgggtttatccagcaccaagattaccctcgaggaaggcgacagttccgacctcacggtctggagtcttccatcggggacgacatatgataacatcagctgggagtccgacaccgaggacgtagctaccgtgagttacggtactgtgaccgccgtgagtccagggaccgccatgattacggcgagcgtctacagcggcggtgtcgagtacactgacacatgtctagtcactgttaccgataccgctgtggtgagtgctctgacagtctacaatccctattcagagaaatacgacagcgcggtcctgtcaggcaagggtttcctgggcgaagaatcaactgggggcgtgctgtccctgggattcaatcgcggcgggtatatcataatctctgtagcagggagcacatacagctggggagagagcctgaactccgtgggcgtggaggtccggaactattcccgtattgtcatgaggctcacttcagttagcggcgtttatgcaacctataatcctagctcatccgtatcccagtccacattcgtaacgaccagcggaatcacatacaacagtgtggcccagtccccttcactgtacctgaaagggctggactacggcacatacaatgtccagtttacagtttacaaggacgggtttctcagcagtactgagattgtgtcggtgacaggtactttcacctattccgaaggagatggaagatacgatacctcttcagaatttacccggttctatgcctggaacagcgatattaccggaagtagcgagctgtgcggcatcaaggtgacctacagctatgcggactattggaacgcagttcttcagagcaaggaagagatgattcactacagcaacggcatagcaagtgcccgatacgagtccgaatgtgtggattatgtcaatacggggaccgcagtgaagagcctcgaagccgctctcagggaggaatttgaatccacctattcttcttatacagacaaaagcgagatgtacgcccagttcatatttacgttcttgcagatccgcttcttctacgagaacgactacacccagtactacgactgctacagctctcattcctctggaacggatgtgtgggcatatccagagatgactatctattcgggcatgggggactgcgaggatacagccgctttgctatcctcactgttcaaagccgccggttacgatactgctctcatcatcctgcccagccacatgatgagtgccttggtgcttagcgattattcttacacagcatcgttcgaatacgggaacaagaaatactacttctgtgagagtactgccgattcaggagtgagaatcggatattgctcttcaacctaccaatacggcgagttttcctattattttgtgtga

SEQ ID NO: 16834 - DNA, 1443 bp, synthetic construct
  source 1..1443: mol_type = other DNA
atggtggacaattcctggattagtagagaccgcgtttcgactgatgctggaaaccgaatcattcgcgtgaaggtgttactaaccatcgccgtcatattaatcgggggctgtaccacttttcttatacacggtttgggcgcaaacgcgacccaataccaaagcgagggagtcgtgatagattttgggaattacaaaactgtctggacaaacatcagtttcagcgagacagacgatccggtcgaattgctgaataaggcctgcgactcccactacagcacaacgcctatcttcacagatggggttctgaccggcatagatgatggagaaaccgtgacttccaacgatgcccagcacacctgggacctgtggtacatcgagaaaggcaagtacgattacgtgaagagcgacacctattcaattaacgcatccgattacaccctgatttcatgggcatataccgaaacggatggcaagcccacaatcggcgtggacgctaccgccacttcgatctacggctactccatgcctcattccctggtcacactgtcccccgtgtgtactgaactggttggcgccatggatgctgcagacattatcatcggtactgacgactcgagcaactacccatcaatcattgccaaggggaaggcagagcatacaattgatgtggtaggaacatatacggaccctagttacgaagctattctgcacgcccacgctgacatggtcttctgcgacgctagcgcttatagccatgtgaccgtggcgagttctctccggaatagtaatgtcaatagcgtggtaatctatgacggggccgacctcgagaccgttctcaataacatattcatcgtgggaactgcgatgaattacgaactgcgtgcagcctatctggcctcacagatcgacatcgccctcgacacccttattgcactaaccaatgcgaacgagggatacaagaccctcgttacgctgagttcagacccctctcctttcattgcgggtacagggacctacgtgaacgatatgctgtacaaaatgaacggctctaatgccatcaacgatcctgtatggccaagcaaaacaccaaagactggctggcggaacgtgactccatccattataatggacacgaacccctcttgcattatcatttttgactacgggaaatatcccgtgggtagctacgacgagatgcttaatgccctttccgatgagtggaagaacacggatgcctataccaacggcaaaatctacctgttcgctgacggactcggggagatggcacagagaagcggcccgaggatcgctcagttgaccgaactcgtggccaggatcgtcaacccagatgcctttacagacggggtcgtaatccccaacgccatcggtgatgactatcaggactatctgaaatatacaagccacttgggattcggcgagtga

SEQ ID NO: 16835 - DNA, 1410 bp, synthetic construct
  source 1..1410: mol_type = other DNA
atgacggatctcaaccgccggtcgttcctcgcggccagcgccgcgttagctggggccgccgtagtgcccagcgccgaagccgctacatatagcccctgtacgcgcatgccccggaagtggaatgagaccttcgacgtgatcgtcgtgggcagtggctttgccgggttagcggccgctgccgaagcaaaacttagtggcgctaaacgcgtggtggtgcttgaaaagatgccgttgcccggcggtaactcaaagattaatggcggcattctagccgttccaggcaatcctgtccaaaaagcgaaggggatacaggacagcgccgctaagttggcagaggatatcaaagcgctcgtgcaggtcacggaagacgacgaaaccctcgtcgaagtgaaaaacgacggcaagctgctgaccattatcgtacccgaggatcgactggccgcaggtgtcgagtacacaaccggctttaccgtggtttgcgctgccgtcactgaggcaatcatcgataggtataacgtgccgatgtacaaggccaacatggtgaaggccgctgtctggggcaaatatccccaaacagtgaatttcgtaggagccaatgtcaaatcaattctcgaacctcctcagatgaacgagggggcaggatttgccctgagaaacattatggcgaaccacgtagtggctctggtgcagagaaacgccatgcagggcgctgcgctctccagtatcttcgaaacctgcgccgcatacgagatgggcgacgccgtagggcccttcgagcggcagcacctgctcgcactggcttaccagggactgaatgccaataacctggtctactctctggtgaaaaagaacgggaagactggaaccgtgggtaccgttatcgcctcgctgatggaaagagcaatcgacgacggagtcattcgagtgaaagagactctcccatccggatacaagatgtacaccaccgatgaccttccaatgtggaacgcatatgccgcggcaggagaggttgccgccgtgatggtgaatgttggtgctgcccgggcagctcagggaataccatccacggtgctgtattacaacgaccttttggaacacgagtcctcactacccggggttgactatggccgtgctgagggggttggtgtggggatgtccttcttttctcatagcatatacggcggcggtggacctgggctgttccacggaaatcatgtcgtgaccaggcacgccaaaggcacactgatcccagctgtgacagcaggcaattgcctggatggcggaactcaaacattctctgctgaggctacaagcgggttgtttaaggatgtgttcgggggtatgcctgagtttaacactccgatgcagttcgtcggagccgaggcaaagaagatcaggaacaagatctga

SEQ ID NO: 16836 - DNA, 1371 bp, synthetic construct
  source 1..1371: mol_type = other DNA
atgaaaatcggtatcaaattgatgacagtgctggcagtcctgttagcaatcaatattagtggcgcggctgccattgccggaatgatgggaggggacggaaacagcggaggcacatccagcgccagcggggaaagccgcctctgggtattcggcaatgcgaaccaggacgaccgaatcgatgaaaccgacattgattacttaaacggtgtgctcgacgggacatatgaagagaacaggctctgtgatgccaataacgacggcgtcgtggattccaaggacgctgattacataagccggatcatcgcggccgctgagaacgggacagacgagattaccgtgtggtacatcgatagctacctgaaggtggcatccgtcgattggccagtgaactctatcgccattggctattgcagcggggcttacgcagcggacatcgctcacctgtgctccaaagtgacgatggtggacaataccatcaagaactactggtctggcatgaactcgcatttcgcttccgccgaaagtttcggcaccactgaggaccccgatacagaggctatgatgaaggcgggcattgatgtgtatgtggtgggttattgcgacgagaacgctgaccagctaactccttccaagctgaatcccgccggtattgacgtcatgttcctaactaccgctgacaacagcggcatagacgagcccaacgagtacattgaccgttcttttctgatattcgcctatcttttgcaaggggacatggacaatgcctatgcataccttgcatggcatgacagagtactgagcgccctcgaagatgctggatcaagtgttactgatgatgagaaagcatcttttgtgatggcccggtcgtcctttcaatatcagaaatccacgataagtgtcaccgggtacaataacaccaataacatccatgccgaatgggtgggagtttacgctgccggccagcacagcagtgtgctgtcgaagaactacaactcactgaccgaggaacaggtactggaggtggtatcttccgagaagagcgcatccggatatatctattacatggacaatgagcacgacggcatgaggcagcagcacacgctggaagaatgtcttgccgccgatgccgagatgctctcagaggccgatgcgtacgtccacctcctgggcatggcccgcgaagcaggtaattctccgatgtacgtggttgaactggcattctatcagaacgttatgtacccagagttgtactcaggggttaattggaagagcctcttctgggagtactttaccttctcagaagaggattatactagtatcattgatatcgacagatttttttatgattacggagtcgtcacaaaggcctga

SEQ ID NO: 16837 - DNA, 1281 bp, synthetic construct
  source 1..1281: mol_type = other DNA
atgaactcctacgccaaagccctattactcatagctgtatcagccttggctctctcggtacttgcgagccctgggacctcggctgaggatacttcatggacagacgttgattctgaaagcggcctgaccgaagccctgaacggcggagctaagaacatccggatcgtctctgacatcacggtgaccggagacctgaacattccagcaggggtccgggtcctcattccctacggtgcagacgacatttccggactgaaggtagggggagaaactttcaggatcgccgggagcagctatgtccatctcaccgtgactcttagtgggaatctggttgttggcggagaactgatcatcggaggtacaattggcaatagcaataccttctcctaccagggacacacatccgcaggccattctgtgctggtgaacaacggatcaatcgctgtgaaatccggcggctccgtgagctgtttcggatttgtgaggggcagtggtgaaatcgtggcggagagcggtagtacggtcacagagcccgtcgttattacagactataccggcggcgacaacctgatgtcaagccacaatgcaaatcaggccatcttcaaccgctacagcatctctaatatccggtgccccctgcaaatcgaccacggagcgacccttctagggaaggtggccattagcgtatccggcatgatacacgagaaccaggttacctacatcggggagacagccaccttcatcagactgtcggaaggcgcaagtgcccgcctcacttatagtgcatctccgtctatagaaagcagcgagagcttgggactccattctgacattgggaaaaccactgtcaccataaccgggggcgcaacctttgaggctatggagatcttggtgaacaacgattttatcaacgctagatatagtttcgccgagcaccccttccctttaccttacactacggtgctggagaacggtaattatctgatgaatgaagactttcgcattctcccaggagccaagctgactgtgggggccgacgccacgctcgcggtgaacaattccctttccgtgctctggggcctggaggataagacttacaaggacggcgtgcgagtcgatatgaaatacccatcaacatcaacgctgggttccagcgggtttgataaatccggcaggctgattgtgaacggcagtttgattctactggataatgctgatttcagtggtatcgctgagatggggagcgcctcagcctcgataacaacctccaagcgtacagat

SEQ ID NO: 16838 - DNA, 1206 bp, synthetic construct
  source 1..1206: mol_type = other DNA
atgattggcttgatttgtctgtctccgttctttttatatatttttctgatacgatattggactattcatccaagtgatttcatggaaaagaaaatactggcaattgcggctgtggcggtagtgatcatcgccggtgccgctgcagcagtggtcctcaccgatgatgatggctcgtccgacagcaagaagggattctattcttgggaccccaccgtcgtggaggtgaacggggactactccaactgcactccctacttcatgaccatagccgagactgtttacgagaaagtttatggcgacgttcctgaatacagtggtatcgcccgctcagacataccctcggagtacctgtattcctatgacagttatgtgaccgcctcaacagaggacaccatcactgtcaaaaccttcgacaacacaagcacaggcacctcctctgcttatctggagaagactgtgaacagcagtcccgtgaaggtgatctgttacacagatgcttacatcgatacgatctatatgattctgtgtaataaatacggggaaaccgcacactcagggaacacaccacaggcagacgaagctctctgggacttgatccctgccatgacctcgagcgtcaaaagcggccttgaaagcaagttcggcctaacggtgccggcatccgtcacgattctcggtacaggccaggaagaccttgtaaattactgcagcgagcactctgatacccaaacgattgtgttcatgtccgagtacaatatcagggccaccaacaagaatagctggtgggacaattgccaggctattgaatccaacacatcagggaatatccagtttattttcacgctgtccaactctccagccatggtcctatctactatcgagatgatcggaaaggtcattggctctgacaataccgatgccatgatgacctccatcctcgccgaaatatacgtaatgcaaaaagcgatagatggatcagggaaagagatcagcttttactgcgagactgccagcgggaacagcgtgggttccaacacactgatgggagggatcttcagcagtatcctgaagatggagaacgtttttgatggaagcctcatgggaagtaagatgagtgatgagcagatcatctccgctgaacctgacgtgatcggcttttacaccagcgacacaagatcaatggacgagaagatgcgggcggcctga

SEQ ID NO: 16839 - DNA, 1188 bp, synthetic construct
  source 1..1188: mol_type = other DNA
atgggcgggaaaggtcgaagatgctccgaagatgcagagtatgataatatgaatgcgaagaaactagcaatcctgtctgcgatagccgcgctggcaatggtttttgccgcggctgctgtggtacagggatctgaggattcagctgcagatgatgcataccagaccttggttgtgggcgacggggacggagagtacgccaccattgcagccgctctggagaaagcaaggaatggagaccacatacagcttgccaaagacgtggaagaagacgtaacgatcgctgctggcaatgtggtgttggacctcaacggccacaagctgaccaatgttagttccgatacgatcaccgtggcgctcggggccgagcttattattacggatagctcagatggcaaagggactgtggacaatgtgaccgacggcaaggccgctgtgtttaacaacggcaccgtcacgattcaaaacggcaaattcatccgctccctggagacaggggtttctccaaaagaaaaaggagacaatagtttttacaccgtgctcaaccatgggattatgacagtcgaaaacggaaccttcgagaacagcggaaagttctccagtctattcgaaaacggctactatacttatgccagcaccgattcacggagcggttatgtggaaagcaccaaccagacagctcccagcctgacaattaacggcggtagtttttcaggtggagtcaacgcaatcaagaatgatgacggaggagtgttagagattacaggcggcactttcgagaatgtgacgcagttctgcgtcatgacctactcgaacgcctctatcaccggagggacctacaagatctccgatagcgccagtgcagccatctactgcaagggcgacaagactgctccgacagacctcggcaagctggggatctccggaaatttgggtaagatcatactggctaacgacgccgacgttaccctgtcgggagacgtcactactgatgtgatagtatgtggcagcggtgccgccacaatcgacctgaacggccacaagctgactaacgcctccgatgacacaatcacagtggccctcggggccagccttactatcactgggaatggtaccgtcgacaatctcacgaacgggaaggccgacgtcttcaacaacgggaccgtcgtgattgagaacggcaagtttaca

SEQ ID NO: 16840 - DNA, 1131 bp, synthetic construct
  source 1..1131: mol_type = other DNA
atgaagactctgtttaaatacatcaccatgatggcactgcccgtttttgcccttgcttcctgccagagcaatgacgatgacgatttcgacaacaaggctgccatcaacgcttcctccatggtggcggagactatagtgaaggggtcagtcaacagcgccacaaagacccttgaactcattacgccgaggcccgtggaacaggaagttaaagcatctttccgtgcggcaccagaactagtgggccggtacaatcaggcatattacacttccgccgtgctgctgcccgacacctgttatgcgtggcaggagaataatgtggtcatcaatccggggagcgtgaagagtacatcggccgtcatcgatttccaaaagttaggaagtctgagcagggactctgtctacgtgctgcctgtcacggcgcaaacaccagggctggagctgctgcagtccaagagtacctactatttcgtctttcgggccggtgctttaatcaatgtggtgcctgacatggaaaaaaacaatatccggattgactggaaaaatacggcaatgattaacagcatgagtcagttgacatttgaagctcttatacgagcccgcgacttcgataggttgatctccaccgtgatgggtatcgaaggctatttcctcatgagaattggagacgccggtgtgccaagcaaccagattcagattgccaccagcaacggcaacctcactaatagcgaccttcagttgcagactaacaaatggtaccacctcgccctgacctacgattcttctaccggaaccatccaggtttatgtcaatggcagaaagatgctcgagggcacaaaatatctaggacgaataaacctgactgatggcgatttctatatcggaagatcctacgaggacagtcgctacctggctggcaacatcagcgaggtgcggatctggaacgtcgtacgcacgcaggaggagattgccgccaatccctattacgttgatcccgcatcagagggcctcgtggcttactggaagctcgacgatatgtcaaccaacgtggtaaaggactacacaatgtacgggaacgacgggaccgccaagaacacactgtcatggcaaaacgtatcgctgcctgagaaatga

SEQ ID NO: 16841 - DNA, 1095 bp, synthetic construct
  source 1..1095: mol_type = other DNA
atgaaagtgaggaatgccctgctgctgaccgctttagcagtgctgcttactgctaccgtgctgacaatcgaatcagaaaatgaaggatcagaggacaccgaccagctcgtaagacaagacgtggatgacggaagttatctgcttctcggcggtgccttcaatcctgaaaaggacatgacgaacatcgaagtgagcaacaacgtgattagcgctcatttcaatttgagtggctattccgagtacaactggacaataatcgatgaggataaaccccgctctacctctacaaccagtttctgtgagtacacaggggacgaaatcactactaccactcctgatctaactttatccaccccaggttacggagactaccagatcatcctttcagtcgatgacgaggaatttagcggagagatcgtgctgatttctactttgacaaagaactatgagtttgaatttgacaatgagaattgccagatcacgtttgagatttcctatgaagagtattacgagacccggaagattgatagcaaccgctctcctactgacgatcgatacagcgacttcgtcacagaggatgattcagtgtcccagatagcggatgaaattctggccatttccgacggcaacgccgacgatgccgccgccatcgcactgagtttcgtccagctgttcatcgcttacccgccatgcaccctcgacggtaacggcagcttcattatgagccccgacatgtacctggttgggaaggagaactacgcattctaccccatagagaccctgttcctcgagacgggcgactgcgaggatacctcgatactttacgcttcgatcctgaaagccatgaacatcgagacaggcttgctgctcatgcccgggcacatgatggcattggccgagctaaccggaggcgacccggaaaacagcaactccagcctctccctgtacaagaccagtgtagatgaccggacatattacgtttgtgagacatcgtcatcccaaacgattccagtggggtacgcgtatgagtctgtcacgtttgggggcaacgacattcagtactatctcaatagcaattatatcgaatttatctga

SEQ ID NO: 16842 - DNA, 1086 bp, synthetic construct
  source 1..1086: mol_type = other DNA
aaaggtatgctgcaaattcggaaaaattatgctcctctcaaaggcacgggcttctcaactccgacctttacatcctcttacggatatgtaattggctatacctacagcaattccacctcagggcagtggaataagctggccgttctggtgaactccaatgcaagtgcttcctacacaatcaacctggggagcagtaattggacgatagtcggcaacaacactaccgcaggggtaaagagtcttggtacagtaagtgggtcaagctacacgatccccgcaagaagcgtggctgttctggttgataccgcaagctttaataatctcaagttgaacgaatcgttcggtactcttaccgtgaagcatgttgacaacaaaggaaacgtgttgaaaacatcgacagccaagtaccgagccggcagtacataccgtgcgttgccagacactacactgctatatgactacaatctcaccaagacggagggcacaactactggtacagtggcggctaacggcaactacactgtgacctttacatacaccgatagcggcgtagcttcaggctacttaaacgtgaactatgttgaccagtccggaaaagccatcaaagacgccaaggcccccgtgggactgatggatgtcgtctccctgccaaaaagcggagccaactatcgggtccttctgaccagcaagggaaagctgacgctggtgcctatcaacgcggatgaagccagatggatcttatgtcgcattgaaaataagacgaaggtggcagggggaaaaattcagctcaacctgtccggggggaggaatatactcgtcgatgagaataaatacagcaccggcgacagcgtgaagctctgcctagagaacaataagattgtcgccgactatcccctggccgagaacgctgtggtgctggtgatctccggacgccacataggggccatcgagaccgtcgacaagtacaccgtggtgaataggcccactgagaacaccatcactttcaaggataacaccgaaaccgtgaaaaagaacgtgttcgtcatcggcagcggcaagtctgagctcccagaggtctctgaatga

SEQ ID NO: 16843 - DNA, 1038 bp, synthetic construct
  source 1..1038: mol_type = other DNA
atgagctttggctcgcacatcggcaggaagcgagctgccgaggctgccgtcgtcattgcgatctgcgccgtgatcttcatcggagaggcatatgcctaccttcctgacgactacggttacgggtccagcgtgtcggatgccggagattatgcagaatataccgtgacagtgaacggtagccacgagtatgctgcttccctgatcagttgtggagattacgtcccagtgtcatcagtataccttttcctcgaggagggtcgcacgtcacagtacagcgacggcagcgacctgttcctgtcccggatggacgagcccgggttctatctggaacaaaccgagaccgctctcagagtttgcggaatcgatgatactgtctatatggacatggacggcctcgccgaggcgctgcagagcgacatttatgagggcaccgctgccggcaaaggcctggtgatggtgtacggtgcatttccgattacagtgtacgacgggtcctccggcgggacagccctggaatggatggaggcaggaggcacagtatattgggtagggccagcccccggcgattacgtgatggcccgcgatggttacgaatacgccggcggtcgtgccttcttcaccggaacggcagaataccttgctgaagacgatccagcggacaccgagggacctttcagaaaggagctgcagttgaaaggcgacttactgatgaacgcccccgacatgagcgggacagggatggaatctttgacggccggatatacttcagggaaccgggggaccctgacatttgtgagggaaggcagtggacagatatgtatcgctgcaggcggtgtctccctctttcaggcggaggatatcgcatcttctgcctctgccggcctatgctggtgtagtgttctattggacacctgcagtggcactgctcacgggagcgattccggaactctggacaagaatggggcatctggaactctctgtgtttacgtgaccgtcggcgatgcctaccagatatacgcgtgccggcatcaaatttga

SEQ ID NO: 16844 - DNA, 1023 bp, synthetic construct
  source 1..1023: mol_type = other DNA
atggataaacgggattacgggctgataattctggctgtggcggtatgcgctgtcgtcctagtgggggagttcgccacctacggcaacatttaccgatacgacagtagcgccgacgcctctgggaactttagtgtctacgattcaggctcgcactgttacacagctgtgctgtccgataatggcagctttcaggccccaactaggttctatgtttattatgatgaaggctatggcagcgtggtacatgacgctaaagtggaagtgggtgccaaagcgctcgatcagaagtactatctcagtcaactggttaacaatctgaagtactacagcgtgacagacgtgacctatgttaacgccgcagagctggctagcaagatgtccgaggccgggactggcgtgggattgatcatgatatccggtgccatccccgagacggtctacagcggggctgctggatgttcaatcctcacatggatcgcatcaggcggatcgctttactgggcaggcgaggcgatcgggaagtacatcgggaaggctgacggaacgacatccgaagttaccggttacgaagcactgtttttgggcgccggcacccttaaccctgagaccggggacactcgcgccctgaatgatgtggctgcaaacagctacagaagggacctctctctaaagaataacgacgtgagatatgcggttaatattgcctccgcaggtgccgattcattggccgtcggatatgaaaaagacggatgtgccagcaccgtgctggtgaagaatggggcggggatggtgtgcgtcatgggaggcaactactccaacaatcagcgcatggacatggccaacatcattgcaagtggaatctgctactgctccgccgagctcgactgcaagacaggaaacgtcgcccggggcaccgtgaccggtacctttagcaattggccggccactggcaacgtagcagctttcctgtatctgggaggcgacttctctgtctatggtaaacttttcacgatgacattatga

SEQ ID NO: 16845 - DNA, 1008 bp, synthetic construct
  source 1..1008: mol_type = other DNA
atgtctgccaacagccacaacagaacgattgccgttctggcagtgtttgggctggtcttctcaggcattacctttatcggcaccagtgacgaatccgctgcggagaatgtatccgccactctttatattgtaccacttggaaacgaacaggccagcacatgggaccaagtgcagacatttcccagtgctctatccaaaacttatgtttgcaactacggtagtacagtgaatatagatatctggccaagtgccggccctggtttcaacggagctgcattctcatttacccagacaaacacgtccagcggactgtctctgagtaccaccatggagaagaccagtccaatgggcacgggcacaaaagtgctgcacatcaccggaactgcactcgacaacacatcggtcagggtatataacaagacaagcatgacaggtagctacgaagcatttatcaacttcaatgtgacgatgccttcctacacccacaccgtgacctattcggccaacggcgggaacggatcaacagaaagcactgtcgtgaccgacagcaataatggcaataccgacgtcacactggccgacagcggcttctcccgcgctgggtacaacttcgcgggctggaagataggcaatacaatttaccagcctggacagttcgttcccgtcgctgccgataccagcgtatcggcggtcgcccagtggacccccattcccgttaccatcacttcttccgccgagcaggctgacattgtggtgggggactccttcgtccggatgatcaccaccgatccgtctggggccacgttgtcagtgagcggggtgtcatgggtcacactgagcggatcaacgctcgtgggtactccaacccaagccggggattacactgtgacggtgaccgcatccaatgagagttcttccgatagccagactatcgtcatccatgtggtgaaccgactcgcttttgagagcgttcccactggcgggatcttagcaactccggtgatatga

SEQ ID NO: 16846 - DNA, 1002 bp, synthetic construct
  source 1..1002: mol_type = other DNA
gaatactacaagagtaatagcacctatcttgatgccctggccgagggcggcttctcgccaagcatcttacagattagcgcctttgccaacaagaaggatgcatccggctatgagtccgcttacaatgtggaggggttctttggcaatgcgcagtacaactacgacaacaaatactttggcagcttctcctatcgaagagatgctagctcccgctttgccaaagagaaccgctggggcagcttctggtccgttggcgcggcttggctgatcaacaaagaggcatggtttaatgccccctgggtggacgagttgaaactgaaggcttctatcgggcagcaaggaaacgataacatcggcaactgggcttacaccgacctctataccctgtctcaggtgtcagatacagagatgtctgcctcctttgcacggttgggaaacaagaatataacatgggaaactacgaccaacttcaatattggtacagagtttagtttcttcaagggacgcctaagtgggagcttcgacttctataccaagaaaactaccgacctgctcttctggctccgtgtgccagagagtcaggggactcggggctactatagcaatgtgggcgacctcaggaacacgggagtcgagttgaccctgacaggtcacattttccggacgaaggattttgactggtcagtcacagccaacctggcacacaacaagaccgaaatactgaagcttgactcgacttcaaaaaatcagtttggagggttctcacaggcaagtgacatgagctacaccatgtattggtacaaagaggggggacctctctacaatgggttcctgcctaagtatgctggagtcaacgaaaagggtgaggcgctatactgggtagatgaggatatcagcgactccgaaagaacaggtaggcccgccccccgacaagaagatcgctgccgggaagccagagtgcatgacaggccggaagaagaggaccaccatctgcagggctga

SEQ ID NO: 16847 - DNA, 993 bp, synthetic construct
  source 1..993: mol_type = other DNA
ctgaatcagataggcatcggcgccctgaagaaggagctttatgcaggacacggtatttccgtggcctaccacacaccagtaggtgacgagaacttctacaatcccgagactgccggccaatatgccaacgccctgctcgggacgaaccacttggtgcaattggtgggctggaatgatgatgtgccagcaaccattttcaatacacgagctcctgggaacggggcctggttatgcaagaatagctggggctcagaaactgatagttatacgaaagatggagtcggctacgctaagagcacgtacggtatcaaaaactccgaaggaaaagcgacagggtacttctggatcagctattatgaccagaccatgaggggcgtggaatctctttctttcctgaccggatttggagacgagaacggatttcagacctaccggcacgacaacatgcctgcttacgccggcacatatgtcggcgggtacgaacaggaagccagctgtgcaaacgtgtttagtgctgcctcgaatgagattctgaaggctgtttccgtacgctcctctgcatacagctcagagatgaacattaagatttatctcctcggtgataataccgcccccggggcgggaaccctggtctatgaccacgacatgttctttcagttcgctggctaccataccgtcctgctggacaaagacatcgccctagaagcaggtaagagatttgctatagtgaccactgagaaaatcgataacgacggccagactatctacgcttataacgtcaacaccgcacccagcgaggaaaaggccaaggccccgaatagcacttccaacgtgtacggaatggcatacatcggggagggggagagtttcataaactacggggaaggctggacagacctgtcgatcccagagatgcatgctgcgattgccgagaagtttcccggcgatgtgttcgacaatttctcaatcaaagcgttcacagttctcgcctga

SEQ ID NO: 16848 - DNA, 1344 bp, synthetic construct
  source 1..1344: mol_type = other DNA
gcccaggtggtctatggatcatttggggataagcacctgtacgctcaatggacggctcacgtgtactccctgacccttacaagcacgggggcaagtgacgggagcgccaccgtgacctatctttcagacgagatcgcgtatctggtggatgcaaaagttactggctataacgtcgtcggctacaatacagagggcggtgtgctggttatcgatgatgaacggcatctcgtggccagcgtggaggggtacaccgacgccgacgggcgatggattagggcacaggacaccgttctgacaccagccaccgtgatccaagtgcacacgctgaccattaactacgagttcagtgcaggaggcaccgctgctgagcagtacgtgggccagtttgagtatgggcaggcctatgacattacctctccagctgtcaccggatatacccccggcgatgccaagataaccggtaccatgggcgaagccaatgtcgagaaagcggtgctctacactgttaaccagtacactatcacattcagcggcaacggaggttcaccggcgggggtagtgcaagaactggattacggtgcacccgtagtcgctcctgacgatcctgaaagagaaggattcgtgttcaagggctgggaaccggccgtgcccgcgactatgcctgctgaaaacattacagtgaacgcagtatggtccgccaagccatcctctccatccgcagaggtaatagagatcgctgattcgcaggctgaaacggtggtcattgacttatccgtgccagccgtcgtcgaggccctaaacaatggcagtaagactgaggtagacctaaaaggagatgggtggaccatggaaatccccaaatccgtcattacaggcgccacaggaaatgtctctgcatctgctaagactctctccgacgatgccaaggcggccctgcctgaggaggccaagaagctcgttgagggcaaaactgtgttttcgctgaacttgtctgacagcaacggggccgtgagcttcagcggtagcaaaattaaggtctccctgccctacgctcttaaggacggcgagaatgcggaccggatctgtatgtactatatcgatgcagagaacaaggcagttcgcgtcgatgccacgtacgacagtgccagcatgtgcgttgtgtttgaaaccgaccatttcagtacttggttcgtggactttgacgcacccgcttcaagcggaggcggtaataatacaatgatcatagtgggggtggtgatagccatcgccgctgtgttgggaatcttcggatacctcatcatgacagggaaactgcagctcggcgccttgggcaaaaagcagtga

SEQ ID NO: 16849 - DNA, 1116 bp, synthetic construct
  source 1..1116: mol_type = other DNA
atgaattacactaaaaaatcatatttggtgattgcacccctcgcaatcattacgatgattgtgtcagtcatccccgcagggctctcggacagctcggatgctgcttcaattaccatcacggatggatatgggacagtgttttcattcgatgacgaacctgcccatgttatcaccgtcggcaaaggaataacgtccacagtgattcaactgagcggtattgacaagattgtcgttgccgacagttattccaagagcgatactgaccctgtgtttgacatcctacgacaatatgttacggacggcaaaataaccgccgggggaaacatctactccagcgggaagagtcagctccagactgaaattatcaatgccgccgacactgcccacggaggagtcttcaacaaggagactgacccagtcatcatcaccggcggaaacagctacatcaccccaatcaaggattatctggtctccaacggcttccagaagatcctcctttggaatgacataacagaatactccaagattcctgacttcgtaagcacaatttctaaaatcctaaccggttccgagtccgacaaggtcgcacagatgcggcacgtcagtgatgtgatcgcgtctggggtggaaggccacgagaaagcggaggcgttctatgtgacatactccggctcggtgtttaaggtgggcaacaccaattccttagccaacagtatgatcggcgcagccggcgggacctcaatcacaacagatgatggtaaagctaagcccacttacgaggcaagcctgaccagtctggtggagtctcatcccaaggctgtgatatttattgatcagtctatcaacggcaatgaaagcagactgaacgacctgaagacccaggtgggtgataacgctaagattgttccgctgaaagctctgtggaataactacagtatcgagagcatgaatggcgtatggaccatggcctgcgccatgtacccggacctcttcagcggcgaggtgcccacagttccagccaaacacgagaataacaccctgctttacttcggggtggggatggcggctgccataataatcgccggagtaggatttatgttcttgcgcaggcactga

SEQ ID NO: 16850 - DNA, 957 bp, synthetic construct
  source 1..957: mol_type = other DNA
atggccgatgaagaagacgtgaaaccaagaaaagagcgggagcccatttccctggtctgcctgattgtaattgtagttgcaaccatcgctgtcgtcggtgcatacgtgaatgaccatatgatcaacgatgggaacgatacggaggccgacactggtagcactgtggtgactgactatacactgtcgctgtacgactactatgacaacggaggagctatataccaaaccaccgtggagagcatagctgactcaacacagtgggtacactccgccggttatacagaagcgacgtcctacagcacattcagtgtgaccatcgggtccgggagcgtgctacaggcctttaatgatgccctttatggcgcgaaggaaggggacaagatccgcctggccatcccattgggcgaagggtacactgcttccagcactacgaaatccgcatcgatgtcaggattgaccaccccgacgtctgtcacgatggctgcatccgagtttaccaatatgtattctgatgtgtctgttccctctaacggggctgcaaccgccattgaaaagaccgttctcggatggagcggcatcgccactgcctcaagtgatggcaaagtcactgtgacatacatgcctacagcgggagaggagtatactattgtggaaggcagcttcggaacagtgaaggcaagtgtcagcacagtttcaggcggagtgattacattcagtctcgtgatctcaaatacgcagaccgtgaccgaccagtactccgacgatctcgacggtttcagcgagatcaagatgataaagctttctttatacaatgtgaccgccggcagtgatgttatctccgggacagtctacatcaacggcctcaacagcggcaacggcgagtttagctataggaccctggccgagaactacaacaccgtcctgtactatgtcatcaccgtgaagtcggtgagttga

SEQ ID NO: 16851 - DNA, 561 bp, synthetic construct
  source 1..561: mol_type = other DNA
atgatcgataagaagatcatcgcaattgcagccgtggccatattagtggtcgccggaattagcgcaataatgataattggcaacgatgatgaggattcaaaggacagcacagatttcgcaggaaaagaactggaagttgcggacaatctggacaacggcatcgtagccgtgggacaggattccttcagatggatgacctattttggcctggctgacaaatgcgacgagccggtctgttcactgtccggcgggcagaagcaacgcgtcgccatcgcccgtgccttgatgcgaaaacccagtctgctgctggctgacgagcctgtggcctcgctcgacccagtgaccggtaggcagatccttgcgctgctacaggacattcagcgcactgagggtgtcgccattctcatgaacagtcacaatctcgaccaaagcagagctgtttccacaaggctccttggcctgcatgccgggcggatcgtgttggacggcgcacccgccgccgtgacggatgcagacctcgctcggatctacgggggagcggaaagcggggctgctccatga

SEQ ID NO: 16852 - DNA, 993 bp, synthetic construct
  source 1..993: mol_type = other DNA
gtggttcctatttcggaagctataattgagcaactttctaaatgcggggactatgattacgagctgctgttcatcgacaacgattccagagataccaccagagacaagatttgcctgctctgcgctcagaaccctaagatcaaggcaatatttaatgccaagaattacggacagttcaattccccctactacggcatcttacaggcaactggcgactgtgtgatcagcatggcggccgactttcaggaccctccggagctcattccccagtatgtggaagcgtgggaggagggatataagctcgtgatgtgtcagaagacctccagcaaagaaagtcgcctggtctacagagcccgcagatcatattaccgcttcatgaggaagcattcgagcgtggagtggctggagcaggtcaacggctctgggctctacgaccgggagttcgtggagatcatgcgtaagatcgacgatcccaagccatttctgaggggcgtcgtggccgagatgggctacaagatcaaactcatcccgtttgaacagcccaaacggagggccggcaagtccagcaacaatttgtttagttactatgacggcgcaatgcagagcatcacatcatacacgaagtacccagtgcggctggccgctggtctagggttggggttgactgccgtgagtgccgtggcatgggcagttgcgattatcaacaaaatcctgaattgggattcctacgccttcacagatgatgttctggcacttgctatattttcagctgtatctctaaatctgttcttcataggaatggtaggggagtatgtgatgaacgtcaacgacagggtgaggaaacgccccctggtcgtcgaagccgagcgcattaacttcggcagggaacgaatcagagaagaccgagtatatcgcggagggtgcgctcgaagcggtgcccaacaaggacaccttcggccaaacggtattcgtatccggaaaggacggagatga

SEQ ID NO: 16853 - DNA, 942 bp, synthetic construct
  source 1..942: mol_type = other DNA
atcaccgaaggccatccagaagtgactgatattgttcctctgaatatgactgagaacgagctgctggcactaaccgcttccgcagagttcggaagccaacaccccatcgccaaagccatcgtgcgaagcgctgaggaacgcggcatggaaatcgcctctgtatccggattcgacacagtggtggggaagggaattgtctgtacagtgaacggccggaaggtcgcagtgggcaatgcctctctcatggaggaggtcggtacggacatttccgccgctgctgaacattataatagcctcactgcagaggccaaaacctgtatgtttgtgtctgccgacgggaccatcgcaggaatcgtggcggtagctgacccgctcagacccaccagttcagaggctgtttcactcatcaaaagtatgggggccatgccagtcatggtgaccggggataacagacagacagcggaggccgtggcacacgccgttggtattaacgaagtcaaatccgaggtccttccccaggacaagctggctatcgtgaagaagtaccagatcatgcagaagacagtggccatggccggcgacgggataaacgatgcccccgcactgacccaagccaatataggcatggcagcgggttatggcacagacattgccataggcgcggctgacgtggtcttgatgaacagcgatcctcgctcagtgcctgtcgctatggatatcggcaggaagacggtgactaacatccgtcagaacctgttccttgccttcgtttacaatgctatttgcattccaatcgccgcaggactcccatacttgctgggtatgggggaatttagccacatgcccatgctggcggccgctgccatgagctgctccagtgtatcggttacgttaaacgccctgaggatgtgcggataccggccggcgtttgcaaatcagtga

SEQ ID NO: 16854 - DNA, 546 bp, synthetic construct
  source 1..546: mol_type = other DNA
atgcatggtaagggactgacgagtgaagaggtgaaggagagggcatcgaaaggacttagcaatgacaaggaggaacgacagagcagaggctactttgagattttcgccaagaacctgctaactccatttaacgtggtgcttttcatcttgggtatagccttactgtatttccaggagctgaccagcgctatcgccgctacaggagtgatcatttttaacgttattgtcagtaccgcccaggaatggaaagctaaacggagactggacaagatcgcggtgctcatgaggcccaaggtaagcgccctccgcgacggggagctgaaggttattgatcggtccgaaatcgtcatggatgatatcctcttcctgggagcgggcgaccaggcacaggtagacggggtcgtggatgacgagaagtccctggagatggatgaatctttgctcaccggggaatcaaaaacaatacgcaagcacaaaggcgaccaagtgttctccggctcatactgtgtgaccggcgagtgctggatgctggtcactggcgtgggg

SEQ ID NO: 16855 - DNA, 333 bp, synthetic construct
  source 1..333: mol_type = other DNA
atgggactcagcaagaatcagaaattgtacatagggtgcttcgcggtcataggagtgttctgtgtggccacactggcactagcggacggcgggtttggcggaagcgacgatgccggtggggagtcagcagacaagtatggctatgaagcctggactggggatatcctcacgattattacaggcgaccccgattacgagcttccaggcgagaccgaaagtatgctgttcgcagtgcaggccgccattggagctatcatcatcgggtactttatcggttacaacgccgctgtaggcaaaaccctgaagaaatccgaggaagagaagaaggaatga

SEQ ID NO: 16856 - DNA, 330 bp, synthetic construct
  source 1..330: mol_type = other DNA
atggcgcttagtaacaatcagaaactgtatattgggtgtttcgccgtaataatcgtgatgagcgtcgtgtttctcgcatgcgtcaatggcgacttcggagggagcgatgacgccgggggcggcgttgcggatgactacggatacgaggcatggaccggggatatcctgacaatcatcaccggcgacccaaactatgagctgcccggggaaactgagtccctcctattcgctgtgcaagccgccattggtgctataatcatcggttactttattggcttcaacgctggacagaagcgggccggaaccggcaagacggagacagaacagtga

SEQ ID NO: 16857 - protein, 499 aa, unidentified
  source 1..499: note = non-methanobrevibacter Methanogen
MKAIVATALTFALIIGMTVFFMSIDEFDQSSAEPPLGLSSTKITLEEGDSSDLTVWSLPSGTTYDNISWESDTEDVATVSYGTVTAVSPGTAMITASVYSGGVEYTDTCLVTVTDTAVVSALTVYNPYSEKYDSAVLSGKGFLGEESTGGVLSLGFNRGGYIIISVAGSTYSWGESLNSVGVEVRNYSRIVMRLTSVSGVYATYNPSSSVSQSTFVTTSGITYNSVAQSPSLYLKGLDYGTYNVQFTVYKDGFLSSTEIVSVTGTFTYSEGDGRYDTSSEFTRFYAWNSDITGSSELCGIKVTYSYADYWNAVLQSKEEMIHYSNGIASARYESECVDYVNTGTAVKSLEAALREEFESTYSSYTDKSEMYAQFIFTFLQIRFFYENDYTQYYDCYSSHSSGTDVWAYPEMTIYSGMGDCEDTAALLSSLFKAAGYDTALIILPSHMMSALVLSDYSYTASFEYGNKKYYFCESTADSGVRIGYCSSTYQYGEFSYYFV

SEQ ID NO: 16858 - protein, 480 aa, unidentified
  source 1..480: note = non-methanobrevibacter Methanogen
MVDNSWISRDRVSTDAGNRIIRVKVLLTIAVILIGGCTTFLIHGLGANATQYQSEGVVIDFGNYKTVWTNISFSETDDPVELLNKACDSHYSTTPIFTDGVLTGIDDGETVTSNDAQHTWDLWYIEKGKYDYVKSDTYSINASDYTLISWAYTETDGKPTIGVDATATSIYGYSMPHSLVTLSPVCTELVGAMDAADIIIGTDDSSNYPSIIAKGKAEHTIDVVGTYTDPSYEAILHAHADMVFCDASAYSHVTVASSLRNSNVNSVVIYDGADLETVLNNIFIVGTAMNYELRAAYLASQIDIALDTLIALTNANEGYKTLVTLSSDPSPFIAGTGTYVNDMLYKMNGSNAINDPVWPSKTPKTGWRNVTPSIIMDTNPSCIIIFDYGKYPVGSYDEMLNALSDEWKNTDAYTNGKIYLFADGLGEMAQRSGPRIAQLTELVARIVNPDAFTDGVVIPNAIGDDYQDYLKYTSHLGFGE

SEQ ID NO: 16859 - protein, 469 aa, unidentified
  source 1..469: note = non-methanobrevibacter Methanogen
MTDLNRRSFLAASAALAGAAVVPSAEAATYSPCTRMPRKWNETFDVIVVGSGFAGLAAAAEAKLSGAKRVVVLEKMPLPGGNSKINGGILAVPGNPVQKAKGIQDSAAKLAEDIKALVQVTEDDETLVEVKNDGKLLTIIVPEDRLAAGVEYTTGFTVVCAAVTEAIIDRYNVPMYKANMVKAAVWGKYPQTVNFVGANVKSILEPPQMNEGAGFALRNIMANHVVALVQRNAMQGAALSSIFETCAAYEMGDAVGPFERQHLLALAYQGLNANNLVYSLVKKNGKTGTVGTVIASLMERAIDDGVIRVKETLPSGYKMYTTDDLPMWNAYAAAGEVAAVMVNVGAARAAQGIPSTVLYYNDLLEHESSLPGVDYGRAEGVGVGMSFFSHSIYGGGGPGLFHGNHVVTRHAKGTLIPAVTAGNCLDGGTQTFSAEATSGLFKDVFGGMPEFNTPMQFVGAEAKKIRNKI

SEQ ID NO: 16860 - protein, 456 aa, unidentified
  source 1..456: note = non-methanobrevibacter Methanogen
MKIGIKLMTVLAVLLAINISGAAAIAGMMGGDGNSGGTSSASGESRLWVFGNANQDDRIDETDIDYLNGVLDGTYEENRLCDANNDGVVDSKDADYISRIIAAAENGTDEITVWYIDSYLKVASVDWPVNSIAIGYCSGAYAADIAHLCSKVTMVDNTIKNYWSGMNSHFASAESFGTTEDPDTEAMMKAGIDVYVVGYCDENADQLTPSKLNPAGIDVMFLTTADNSGIDEPNEYIDRSFLIFAYLLQGDMDNAYAYLAWHDRVLSALEDAGSSVTDDEKASFVMARSSFQYQKSTISVTGYNNTNNIHAEWVGVYAAGQHSSVLSKNYNSLTEEQVLEVVSSEKSASGYIYYMDNEHDGMRQQHTLEECLAADAEMLSEADAYVHLLGMAREAGNSPMYVVELAFYQNVMYPELYSGVNWKSLFWEYFTFSEEDYTSIIDIDRFFYDYGVVTKA

SEQ ID NO: 16861 - protein, 427 aa, unidentified
  source 1..427: note = non-methanobrevibacter Methanogen
MNSYAKALLLIAVSALALSVLASPGTSAEDTSWTDVDSESGLTEALNGGAKNIRIVSDITVTGDLNIPAGVRVLIPYGADDISGLKVGGETFRIAGSSYVHLTVTLSGNLVVGGELIIGGTIGNSNTFSYQGHTSAGHSVLVNNGSIAVKSGGSVSCFGFVRGSGEIVAESGSTVTEPVVITDYTGGDNLMSSHNANQAIFNRYSISNIRCPLQIDHGATLLGKVAISVSGMIHENQVTYIGETATFIRLSEGASARLTYSASPSIESSESLGLHSDIGKTTVTITGGATFEAMEILVNNDFINARYSFAEHPFPLPYTTVLENGNYLMNEDFRILPGAKLTVGADATLAVNNSLSVLWGLEDKTYKDGVRVDMKYPSTSTLGSSGFDKSGRLIVNGSLILLDNADFSGIAEMGSASASITTSKRTD

SEQ ID NO: 16862 - protein, 401 aa, unidentified
  source 1..401: note = non-methanobrevibacter Methanogen
MIGLICLSPFFLYIFLIRYWTIHPSDFMEKKILAIAAVAVVIIAGAAAAVVLTDDDGSSDSKKGFYSWDPTVVEVNGDYSNCTPYFMTIAETVYEKVYGDVPEYSGIARSDIPSEYLYSYDSYVTASTEDTITVKTFDNTSTGTSSAYLEKTVNSSPVKVICYTDAYIDTIYMILCNKYGETAHSGNTPQADEALWDLIPAMTSSVKSGLESKFGLTVPASVTILGTGQEDLVNYCSEHSDTQTIVFMSEYNIRATNKNSWWDNCQAIESNTSGNIQFIFTLSNSPAMVLSTIEMIGKVIGSDNTDAMMTSILAEIYVMQKAIDGSGKEISFYCETASGNSVGSNTLMGGIFSSILKMENVFDGSLMGSKMSDEQIISAEPDVIGFYTSDTRSMDEKMRAA

SEQ ID NO: 16863 - protein, 396 aa, unidentified
  source 1..396: note = non-methanobrevibacter Methanogen
MGGKGRRCSEDAEYDNMNAKKLAILSAIAALAMVFAAAAVVQGSEDSAADDAYQTLVVGDGDGEYATIAAALEKARNGDHIQLAKDVEEDVTIAAGNVVLDLNGHKLTNVSSDTITVALGAELIITDSSDGKGTVDNVTDGKAAVFNNGTVTIQNGKFIRSLETGVSPKEKGDNSFYTVLNHGIMTVENGTFENSGKFSSLFENGYYTYASTDSRSGYVESTNQTAPSLTINGGSFSGGVNAIKNDDGGVLEITGGTFENVTQFCVMTYSNASITGGTYKISDSASAAIYCKGDKTAPTDLGKLGISGNLGKIILANDADVTLSGDVTTDVIVCGSGAATIDLNGHKLTNASDDTITVALGASLTITGNGTVDNLTNGKADVFNNGTVVIENGKFT

SEQ ID NO: 16864 - protein, 376 aa, unidentified
  source 1..376: note = non-methanobrevibacter Methanogen
MKTLFKYITMMALPVFALASCQSNDDDDFDNKAAINASSMVAETIVKGSVNSATKTLELITPRPVEQEVKASFRAAPELVGRYNQAYYTSAVLLPDTCYAWQENNVVINPGSVKSTSAVIDFQKLGSLSRDSVYVLPVTAQTPGLELLQSKSTYYFVFRAGALINVVPDMEKNNIRIDWKNTAMINSMSQLTFEALIRARDFDRLISTVMGIEGYFLMRIGDAGVPSNQIQIATSNGNLTNSDLQLQTNKWYHLALTYDSSTGTIQVYVNGRKMLEGTKYLGRINLTDGDFYIGRSYEDSRYLAGNISEVRIWNVVRTQEEIAANPYYVDPASEGLVAYWKLDDMSTNVVKDYTMYGNDGTAKNTLSWQNVSLPEK

SEQ ID NO: 16865 - protein, 364 aa, unidentified
  source 1..364: note = non-methanobrevibacter Methanogen
MKVRNALLLTALAVLLTATVLTIESENEGSEDTDQLVRQDVDDGSYLLLGGAFNPEKDMTNIEVSNNVISAHFNLSGYSEYNWTIIDEDKPRSTSTTSFCEYTGDEITTTTPDLTLSTPGYGDYQIILSVDDEEFSGEIVLISTLTKNYEFEFDNENCQITFEISYEEYYETRKIDSNRSPTDDRYSDFVTEDDSVSQIADEILAISDGNADDAAAIALSFVQLFIAYPPCTLDGNGSFIMSPDMYLVGKENYAFYPIETLFLETGDCEDTSILYASILKAMNIETGLLLMPGHMMALAELTGGDPENSNSSLSLYKTSVDDRTYYVCETSSSQTIPVGYAYESVTFGGNDIQYYLNSNYIEFI

SEQ ID NO: 16866 - protein, 361 aa, unidentified
  source 1..361: note = non-methanobrevibacter Methanogen
KGMLQIRKNYAPLKGTGFSTPTFTSSYGYVIGYTYSNSTSGQWNKLAVLVNSNASASYTINLGSSNWTIVGNNTTAGVKSLGTVSGSSYTIPARSVAVLVDTASFNNLKLNESFGTLTVKHVDNKGNVLKTSTAKYRAGSTYRALPDTTLLYDYNLTKTEGTTTGTVAANGNYTVTFTYTDSGVASGYLNVNYVDQSGKAIKDAKAPVGLMDVVSLPKSGANYRVLLTSKGKLTLVPINADEARWILCRIENKTKVAGGKIQLNLSGGRNILVDENKYSTGDSVKLCLENNKIVADYPLAENAVVLVISGRHIGAIETVDKYTVVNRPTENTITFKDNTETVKKNVFVIGSGKSELPEVSE

SEQ ID NO: 16867 - protein, 345 aa, unidentified
  source 1..345: note = non-methanobrevibacter Methanogen
MSFGSHIGRKRAAEAAVVIAICAVIFIGEAYAYLPDDYGYGSSVSDAGDYAEYTVTVNGSHEYAASLISCGDYVPVSSVYLFLEEGRTSQYSDGSDLFLSRMDEPGFYLEQTETALRVCGIDDTVYMDMDGLAEALQSDIYEGTAAGKGLVMVYGAFPITVYDGSSGGTALEWMEAGGTVYWVGPAPGDYVMARDGYEYAGGRAFFTGTAEYLAEDDPADTEGPFRKELQLKGDLLMNAPDMSGTGMESLTAGYTSGNRGTLTFVREGSGQICIAAGGVSLFQAEDIASSASAGLCWCSVLLDTCSGTAHGSDSGTLDKNGASGTLCVYVTVGDAYQIYACRHQI

SEQ ID NO: 16868 - protein, 340 aa, unidentified
  source 1..340: note = non-methanobrevibacter Methanogen
MDKRDYGLIILAVAVCAVVLVGEFATYGNIYRYDSSADASGNFSVYDSGSHCYTAVLSDNGSFQAPTRFYVYYDEGYGSVVHDAKVEVGAKALDQKYYLSQLVNNLKYYSVTDVTYVNAAELASKMSEAGTGVGLIMISGAIPETVYSGAAGCSILTWIASGGSLYWAGEAIGKYIGKADGTTSEVTGYEALFLGAGTLNPETGDTRALNDVAANSYRRDLSLKNNDVRYAVNIASAGADSLAVGYEKDGCASTVLVKNGAGMVCVMGGNYSNNQRMDMANIIASGICYCSAELDCKTGNVARGTVTGTFSNWPATGNVAAFLYLGGDFSVYGKLFTMTL

SEQ ID NO: 16869 - protein, 335 aa, unidentified
  source 1..335: note = non-methanobrevibacter Methanogen
MSANSHNRTIAVLAVFGLVFSGITFIGTSDESAAENVSATLYIVPLGNEQASTWDQVQTFPSALSKTYVCNYGSTVNIDIWPSAGPGFNGAAFSFTQTNTSSGLSLSTTMEKTSPMGTGTKVLHITGTALDNTSVRVYNKTSMTGSYEAFINFNVTMPSYTHTVTYSANGGNGSTESTVVTDSNNGNTDVTLADSGFSRAGYNFAGWKIGNTIYQPGQFVPVAADTSVSAVAQWTPIPVTITSSAEQADIVVGDSFVRMITTDPSGATLSVSGVSWVTLSGSTLVGTPTQAGDYTVTVTASNESSSDSQTIVIHVVNRLAFESVPTGGILATPVI

SEQ ID NO: 16870 - protein, 333 aa, unidentified
  source 1..333: note = non-methanobrevibacter Methanogen
EYYKSNSTYLDALAEGGFSPSILQISAFANKKDASGYESAYNVEGFFGNAQYNYDNKYFGSFSYRRDASSRFAKENRWGSFWSVGAAWLINKEAWFNAPWVDELKLKASIGQQGNDNIGNWAYTDLYTLSQVSDTEMSASFARLGNKNITWETTTNFNIGTEFSFFKGRLSGSFDFYTKKTTDLLFWLRVPESQGTRGYYSNVGDLRNTGVELTLTGHIFRTKDFDWSVTANLAHNKTEILKLDSTSKNQFGGFSQASDMSYTMYWYKEGGPLYNGFLPKYAGVNEKGEALYWVDEDISDSERTGRPAPRQEDRCREARVHDRPEEEDHHLQG

SEQ ID NO: 16871 - protein, 330 aa, unidentified
  source 1..330: note = non-methanobrevibacter Methanogen
LNQIGIGALKKELYAGHGISVAYHTPVGDENFYNPETAGQYANALLGTNHLVQLVGWNDDVPATIFNTRAPGNGAWLCKNSWGSETDSYTKDGVGYAKSTYGIKNSEGKATGYFWISYYDQTMRGVESLSFLTGFGDENGFQTYRHDNMPAYAGTYVGGYEQEASCANVFSAASNEILKAVSVRSSAYSSEMNIKIYLLGDNTAPGAGTLVYDHDMFFQFAGYHTVLLDKDIALEAGKRFAIVTTEKIDNDGQTIYAYNVNTAPSEEKAKAPNSTSNVYGMAYIGEGESFINYGEGWTDLSIPEMHAAIAEKFPGDVFDNFSIKAFTVLA

SEQ ID NO: 16872 - protein, 447 aa, unidentified
  source 1..447: note = non-methanobrevibacter Methanogen
AQVVYGSFGDKHLYAQWTAHVYSLTLTSTGASDGSATVTYLSDEIAYLVDAKVTGYNVVGYNTEGGVLVIDDERHLVASVEGYTDADGRWIRAQDTVLTPATVIQVHTLTINYEFSAGGTAAEQYVGQFEYGQAYDITSPAVTGYTPGDAKITGTMGEANVEKAVLYTVNQYTITFSGNGGSPAGVVQELDYGAPVVAPDDPEREGFVFKGWEPAVPATMPAENITVNAVWSAKPSSPSAEVIEIADSQAETVVIDLSVPAVVEALNNGSKTEVDLKGDGWTMEIPKSVITGATGNVSASAKTLSDDAKAALPEEAKKLVEGKTVFSLNLSDSNGAVSFSGSKIKVSLPYALKDGENADRICMYYIDAENKAVRVDATYDSASMCVVFETDHFSTWFVDFDAPASSGGGNNTMIIVGVVIAIAAVLGIFGYLIMTGKLQLGALGKKQ

SEQ ID NO: 16873 - protein, 371 aa, unidentified
  source 1..371: note = non-methanobrevibacter Methanogen
MNYTKKSYLVIAPLAIITMIVSVIPAGLSDSSDAASITITDGYGTVFSFDDEPAHVITVGKGITSTVIQLSGIDKIVVADSYSKSDTDPVFDILRQYVTDGKITAGGNIYSSGKSQLQTEIINAADTAHGGVFNKETDPVIITGGNSYITPIKDYLVSNGFQKILLWNDITEYSKIPDFVSTISKILTGSESDKVAQMRHVSDVIASGVEGHEKAEAFYVTYSGSVFKVGNTNSLANSMIGAAGGTSITTDDGKAKPTYEASLTSLVESHPKAVIFIDQSINGNESRLNDLKTQVGDNAKIVPLKALWNNYSIESMNGVWTMACAMYPDLFSGEVPTVPAKHENNTLLYFGVGMAAAIIIAGVGFMFLRRH

SEQ ID NO: 16874 - protein, 318 aa, unidentified
  source 1..318: note = non-methanobrevibacter Methanogen
MADEEDVKPRKEREPISLVCLIVIVVATIAVVGAYVNDHMINDGNDTEADTGSTVVTDYTLSLYDYYDNGGAIYQTTVESIADSTQWVHSAGYTEATSYSTFSVTIGSGSVLQAFNDALYGAKEGDKIRLAIPLGEGYTASSTTKSASMSGLTTPTSVTMAASEFTNMYSDVSVPSNGAATAIEKTVLGWSGIATASSDGKVTVTYMPTAGEEYTIVEGSFGTVKASVSTVSGGVITFSLVISNTQTVTDQYSDDLDGFSEIKMIKLSLYNVTAGSDVISGTVYINGLNSGNGEFSYRTLAENYNTVLYYVITVKSVS

SEQ ID NO: 16875 - protein, 186 aa, unidentified
  source 1..186: note = non-methanobrevibacter Methanogen
MIDKKIIAIAAVAILVVAGISAIMIIGNDDEDSKDSTDFAGKELEVADNLDNGIVAVGQDSFRWMTYFGLADKCDEPVCSLSGGQKQRVAIARALMRKPSLLLADEPVASLDPVTGRQILALLQDIQRTEGVAILMNSHNLDQSRAVSTRLLGLHAGRIVLDGAPAAVTDADLARIYGGAESGAAP

SEQ ID NO: 16876 - protein, 330 aa, unidentified
  source 1..330: note = non-methanobrevibacter Methanogen
MVPISEAIIEQLSKCGDYDYELLFIDNDSRDTTRDKICLLCAQNPKIKAIFNAKNYGQFNSPYYGILQATGDCVISMAADFQDPPELIPQYVEAWEEGYKLVMCQKTSSKESRLVYRARRSYYRFMRKHSSVEWLEQVNGSGLYDREFVEIMRKIDDPKPFLRGVVAEMGYKIKLIPFEQPKRRAGKSSNNLFSYYDGAMQSITSYTKYPVRLAAGLGLGLTAVSAVAWAVAIINKILNWDSYAFTDDVLALAIFSAVSLNLFFIGMVGEYVMNVNDRVRKRPLVVEAERINFGRERIREDRVYRGGCARSGAQQGHLRPNGIRIRKGRR

SEQ ID NO: 16877 - protein, 313 aa, unidentified
  source 1..313: note = non-methanobrevibacter Methanogen
ITEGHPEVTDIVPLNMTENELLALTASAEFGSQHPIAKAIVRSAEERGMEIASVSGFDTVVGKGIVCTVNGRKVAVGNASLMEEVGTDISAAAEHYNSLTAEAKTCMFVSADGTIAGIVAVADPLRPTSSEAVSLIKSMGAMPVMVTGDNRQTAEAVAHAVGINEVKSEVLPQDKLAIVKKYQIMQKTVAMAGDGINDAPALTQANIGMAAGYGTDIAIGAADVVLMNSDPRSVPVAMDIGRKTVTNIRQNLFLAFVYNAICIPIAAGLPYLLGMGEFSHMPMLAAAAMSCSSVSVTLNALRMCGYRPAFANQ

SEQ ID NO: 16878 - protein, 182 aa, unidentified
  source 1..182: note = non-methanobrevibacter Methanogen
MHGKGLTSEEVKERASKGLSNDKEERQSRGYFEIFAKNLLTPFNVVLFILGIALLYFQELTSAIAATGVIIFNVIVSTAQEWKAKRRLDKIAVLMRPKVSALRDGELKVIDRSEIVMDDILFLGAGDQAQVDGVVDDEKSLEMDESLLTGESKTIRKHKGDQVFSGSYCVTGECWMLVTGVG

SEQ ID NO: 16879 - protein, 110 aa, unidentified
  source 1..110: note = non-methanobrevibacter Methanogen
MGLSKNQKLYIGCFAVIGVFCVATLALADGGFGGSDDAGGESADKYGYEAWTGDILTIITGDPDYELPGETESMLFAVQAAIGAIIIGYFIGYNAAVGKTLKKSEEEKKE

SEQ ID NO: 16880 - protein, 109 aa, unidentified
  source 1..109: note = non-methanobrevibacter Methanogen
MALSNNQKLYIGCFAVIIVMSVVFLACVNGDFGGSDDAGGGVADDYGYEAWTGDILTIITGDPNYELPGETESLLFAVQAAIGAIIIGYFIGFNAGQKRAGTGKTETEQ

SEQ ID NO: 16881 - DNA, 1500 bp, synthetic construct; identical to SEQ ID NO: 16809
  source 1..1500: mol_type = other DNA

SEQ ID NO: 16882 - DNA, 1443 bp, synthetic construct; identical to SEQ ID NO: 16810
  source 1..1443: mol_type = other DNA

SEQ ID NO: 16883 - DNA, 1410 bp, synthetic construct; identical to SEQ ID NO: 16811
  source 1..1410: mol_type = other DNA

SEQ ID NO: 16884 - DNA, 1371 bp, synthetic construct; identical to SEQ ID NO: 16812
  source 1..1371: mol_type = other DNA

SEQ ID NO: 16885 - DNA, 1281 bp, synthetic construct; identical to SEQ ID NO: 16813
  source 1..1281: mol_type = other DNA

SEQ ID NO: 16886 - DNA, 1206 bp, synthetic construct; identical to SEQ ID NO: 16814
  source 1..1206: mol_type = other DNA

SEQ ID NO: 16887 - DNA, 1188 bp, synthetic construct; identical to SEQ ID NO: 16815
  source 1..1188: mol_type = other DNA

SEQ ID NO: 16888 - DNA, 1131 bp, synthetic construct; identical to SEQ ID NO: 16816
  source 1..1131: mol_type = other DNA

SEQ ID NO: 16889 - DNA, 1095 bp, synthetic construct; identical to SEQ ID NO: 16817
  source 1..1095: mol_type = other DNA

SEQ ID NO: 16890 - DNA, 1086 bp, synthetic construct; identical to SEQ ID NO: 16818
  source 1..1086: mol_type = other DNA

SEQ ID NO: 16891 - DNA, 1038 bp, synthetic construct; identical to SEQ ID NO: 16819
  source 1..1038: mol_type = other DNA

SEQ ID NO: 16892 - DNA, 1023 bp, synthetic construct; identical to SEQ ID NO: 16820
  source 1..1023: mol_type = other DNA

SEQ ID NO: 16893 - DNA, 1008 bp, synthetic construct; identical to SEQ ID NO: 16821
  source 1..1008: mol_type = other DNA

SEQ ID NO: 16894 - DNA, 1002 bp, synthetic construct; identical to SEQ ID NO: 16822
  source 1..1002: mol_type = other DNA

SEQ ID NO: 16895 - DNA, 993 bp, synthetic construct; identical to SEQ ID NO: 16823
  source 1..993: mol_type = other DNA

SEQ ID NO: 16896 - DNA, 1344 bp, synthetic construct; identical to SEQ ID NO: 16824
  source 1..1344: mol_type = other DNA

SEQ ID NO: 16897 - DNA, 1116 bp, synthetic construct; identical to SEQ ID NO: 16825
  source 1..1116: mol_type = other DNA

SEQ ID NO: 16898 - DNA, 957 bp, synthetic construct; identical to SEQ ID NO: 16826
  source 1..957: mol_type = other DNA

SEQ ID NO: 16899 - DNA, 561 bp, synthetic construct; identical to SEQ ID NO: 16827
  source 1..561: mol_type = other DNA

SEQ ID NO: 16900 - DNA, 993 bp, synthetic construct; identical to SEQ ID NO: 16828
  source 1..993: mol_type = other DNA

SEQ ID NO: 16901 - DNA, 942 bp, synthetic construct; identical to SEQ ID NO: 16829
  source 1..942: mol_type = other DNA

SEQ ID NO: 16902 - DNA, 546 bp, synthetic construct; identical to SEQ ID NO: 16830
  source 1..546: mol_type = other DNA

SEQ ID NO: 16903 - DNA, 333 bp, synthetic construct; identical to SEQ ID NO: 16831
  source 1..333: mol_type = other DNA

SEQ ID NO: 16904 - DNA, 330 bp, synthetic construct; identical to SEQ ID NO: 16832
  source 1..330: mol_type = other DNA

SEQ ID NO: 16905 - DNA, 1500 bp, synthetic construct; identical to SEQ ID NO: 16833
  source 1..1500: mol_type = other DNA

SEQ ID NO: 16906 - DNA, 1443 bp, synthetic construct; identical to SEQ ID NO: 16834
  source 1..1443: mol_type = other DNA

SEQ ID NO: 16907 - DNA, 1410 bp, synthetic construct; identical to SEQ ID NO: 16835
  source 1..1410: mol_type = other DNA

SEQ ID NO: 16908 - DNA, 1371 bp, synthetic construct; identical to SEQ ID NO: 16836
  source 1..1371: mol_type = other DNA

SEQ ID NO: 16909 - DNA, 1281 bp, synthetic construct; identical to SEQ ID NO: 16837
  source 1..1281: mol_type = other DNA

SEQ ID NO: 16910 - DNA, 1206 bp, synthetic construct; identical to SEQ ID NO: 16838
  source 1..1206: mol_type = other DNA

SEQ ID NO: 16911 - DNA, 1188 bp, synthetic construct; identical to SEQ ID NO: 16839
  source 1..1188: mol_type = other DNA

SEQ ID NO: 16912 - DNA, 1131 bp, synthetic construct; identical to SEQ ID NO: 16840
  source 1..1131: mol_type = other DNA

SEQ ID NO: 16913 - DNA, 1095 bp, synthetic construct; identical to SEQ ID NO: 16841
  source 1..1095: mol_type = other DNA

SEQ ID NO: 16914 - DNA, 1086 bp, synthetic construct; identical to SEQ ID NO: 16842
  source 1..1086: mol_type = other DNA

SEQ ID NO: 16915 - DNA, 1038 bp, synthetic construct; identical to SEQ ID NO: 16843
  source 1..1038: mol_type = other DNA

SEQ ID NO: 16916 - DNA, 1023 bp, synthetic construct; identical to SEQ ID NO: 16844
  source 1..1023: mol_type = other DNA

SEQ ID NO: 16917 - DNA, 1008 bp, synthetic construct; identical to SEQ ID NO: 16845
  source 1..1008: mol_type = other DNA

SEQ ID NO: 16918 - DNA, 1002 bp, synthetic construct; identical to SEQ ID NO: 16846
  source 1..1002: mol_type = other DNA

SEQ ID NO: 16919 - DNA, 993 bp, synthetic construct; identical to SEQ ID NO: 16847
  source 1..993: mol_type = other DNA

SEQ ID NO: 16920 - DNA, 1344 bp, synthetic construct; identical to SEQ ID NO: 16848
  source 1..1344: mol_type = other DNA

SEQ ID NO: 16921 - DNA, 1116 bp, synthetic construct; identical to SEQ ID NO: 16849
  source 1..1116: mol_type = other DNA

SEQ ID NO: 16922 - DNA, 957 bp, synthetic construct; identical to SEQ ID NO: 16850
  source 1..957: mol_type = other DNA

SEQ ID NO: 16923 - DNA, 561 bp, synthetic construct; identical to SEQ ID NO: 16851
  source 1..561: mol_type = other DNA

SEQ ID NO: 16924 - DNA, 993 bp, synthetic construct; identical to SEQ ID NO: 16852
  source 1..993: mol_type = other DNA

SEQ ID NO: 16925 - DNA, 942 bp, synthetic construct; identical to SEQ ID NO: 16853
  source 1..942: mol_type = other DNA

SEQ ID NO: 16926 - DNA, 546 bp, synthetic construct; identical to SEQ ID NO: 16854
  source 1..546: mol_type = other DNA

SEQ ID NO: 16927 - DNA, 333 bp, synthetic construct; identical to SEQ ID NO: 16855
  source 1..333: mol_type = other DNA

SEQ ID NO: 16928 - DNA, 330 bp, synthetic construct; identical to SEQ ID NO: 16856
  source 1..330: mol_type = other DNA

SEQ ID NO: 16929 - protein, 499 aa, synthetic construct; identical to SEQ ID NO: 16857

SEQ ID NO: 16930 - protein, 480 aa, synthetic construct; identical to SEQ ID NO: 16858

SEQ ID NO: 16931 - protein, 469 aa, synthetic construct; identical to SEQ ID NO: 16859

SEQ ID NO: 16932 - protein, 456 aa, synthetic construct; identical to SEQ ID NO: 16860

SEQ ID NO: 16933 - protein, 427 aa, synthetic construct; identical to SEQ ID NO: 16861

SEQ ID NO: 16934 - protein, 401 aa, synthetic construct; identical to SEQ ID NO: 16862

SEQ ID NO: 16935 - protein, 396 aa, synthetic construct; identical to SEQ ID NO: 16863

SEQ ID NO: 16936 - protein, 376 aa, synthetic construct; identical to SEQ ID NO: 16864

SEQ ID NO: 16937 - protein, 364 aa, synthetic construct; identical to SEQ ID NO: 16865

SEQ ID NO: 16938 - protein, 361 aa, synthetic construct; identical to SEQ ID NO: 16866

SEQ ID NO: 16939 - protein, 345 aa, synthetic construct; identical to SEQ ID NO: 16867

SEQ ID NO: 16940 - protein, 340 aa, synthetic construct; identical to SEQ ID NO: 16868

SEQ ID NO: 16941 - protein, 335 aa, synthetic construct; identical to SEQ ID NO: 16869

SEQ ID NO: 16942 - protein, 333 aa, synthetic construct; identical to SEQ ID NO: 16870

SEQ ID NO: 16943 - protein, 330 aa, synthetic construct; identical to SEQ ID NO: 16871

SEQ ID NO: 16944 - protein, 447 aa, synthetic construct; identical to SEQ ID NO: 16872

SEQ ID NO: 16945 - protein, 371 aa, synthetic construct; identical to SEQ ID NO: 16873

SEQ ID NO: 16946 - protein, 318 aa, synthetic construct; identical to SEQ ID NO: 16874

SEQ ID NO: 16947 - protein, 186 aa, synthetic construct; identical to SEQ ID NO: 16875

SEQ ID NO: 16948 - protein, 330 aa, synthetic construct; identical to SEQ ID NO: 16876

SEQ ID NO: 16949 - protein, 313 aa, synthetic construct; identical to SEQ ID NO: 16877

SEQ ID NO: 16950 - protein, 182 aa, synthetic construct; identical to SEQ ID NO: 16878

SEQ ID NO: 16951 - protein, 110 aa, synthetic construct; identical to SEQ ID NO: 16879

SEQ ID NO: 16952 - protein, 109 aa, synthetic construct; identical to SEQ ID NO: 16880

SEQ ID NO: 16953 - RNA, 54 nt, synthetic construct
  source 1..54: mol_type = other RNA
gagaataaactagtattcttctggtccccacagactcagagagaacccgccacc

SEQ ID NO: 16954 - RNA, 295 nt, synthetic construct
  source 1..295: mol_type = other RNA
ctcgagctggtactgcatgcacgcaatgctagctgcccctttcccgtcctgggtaccccgagtctcccccgacctcgggtcccaggtatgctcccacctccacctgccccactcaccacctctgctagttccagacacctcccaagcacgcagcaatgcagctcaaaacgcttagcctagccacacccccacgggaaacagcagtgattaacctttagcaataaacgaaagtttaactaagctatactaaccccagggttggtcaatttcgtgccagccacaccctggagctagc

SEQ ID NO: 16955 - RNA, 24 nt, synthetic construct
  source 1..24: mol_type = other RNA
caaaggctcttttcagagccacca

SEQ ID NO: 16956 - RNA, 24 nt, synthetic construct
  source 1..24: mol_type = other RNA
caaaggctcttttcagagccacca

SEQ ID NO: 16957 - RNA, 250 nt, synthetic construct
  source 1..250: mol_type = other RNA
  variation 101..250: note = Nucleotides may be deleted
aaaaaaaaaaaaaaaaaaaaaaaaaaaaaaaaaaaaaaaaaaaaaaaaaaaaaaaaaaaaaaaaaaaaaaaaaaaaaaaaaaaaaaaaaaaaaaaaaaaaaaaaaaaaaaaaaaaaaaaaaaaaaaaaaaaaaaaaaaaaaaaaaaaaaaaaaaaaaaaaaaaaaaaaaaaaaaaaaaaaaaaaaaaaaaaaaaaaaaaaaaaaaaaaaaaaaaaaaaaaaaaaaaaaaaaaaaaaaaaaaaaaaaaaaa

SEQ ID NO: 16958 - protein, 13 aa, synthetic construct
MFVFLVLLPLVSS

SEQ ID NO: 16959 - protein, 25 aa, synthetic construct
PWYIWLGFIAGLIAIVMVTIMLCCM

SEQ ID NO: 16960 - protein, 37 aa, synthetic construct
MTSCCSCLKGCCSCGSCCKFDEDDSEPVLKGVKLHYT

SEQ ID NO: 16961 - DNA, 48 bp, synthetic construct
  source 1..48: mol_type = other DNA
atgttcgtgttcctggtgctgctgcctctggtgtccagccagtgtgtg

SEQ ID NO: 16962 - DNA, 75 bp, synthetic construct
  source 1..75: mol_type = other DNA
ccctggtacatctggctgggctttatcgccggactgattgccatcgtgatggtcacaatcatgctgtgttgcatg

SEQ ID NO: 16963 - DNA, 111 bp, synthetic construct
  source 1..111: mol_type = other DNA
atgaccagctgctgtagctgcctgaagggctgttgtagctgtggcagctgctgcaagttcgacgaggacgattctgagcccgtgctgaagggcgtgaaactgcactacaca

SEQ ID NO: 16964 - DNA, 48 bp, synthetic construct
  source 1..48: mol_type = other DNA
atgttcgtgttcctcgtgctcctgcccctcgtctccagccagtgcgtg

SEQ ID NO: 16965 - RNA, 47 nt, synthetic construct
  source 1..47: mol_type = other RNA
aggaaataagagagaaaagaagagtaagaagaaatataagagccacc

SEQ ID NO: 16966 - RNA, 93 nt, synthetic construct
  source 1..93: mol_type = other RNA
gctgccttctgcggggcttgccttctggccatgcccttcttctctcccttgcacctgtacctcttggtctttgaataaagcctgagtaggaag

SEQ ID NO: 16967 - RNA, 47 nt, synthetic construct; identical to SEQ ID NO: 16965
  source 1..47: mol_type = other RNA

SEQ ID NO: 16968 - RNA, 93 nt, synthetic construct; identical to SEQ ID NO: 16966
  source 1..93: mol_type = other RNA

SEQ ID NO: 16969 - DNA, 51 bp, synthetic construct
  source 1..51: mol_type = other DNA
tacctcatgacactgagcctgccagggttcgcacatcccttcgcactcccc

SEQ ID NO: 16970 - DNA, 51 bp, synthetic construct
  source 1..51: mol_type = other DNA
tacctcatgacactccccctggacggactcgggcaccccttccccctgcca

SEQ ID NO: 16971 - DNA, 54 bp, synthetic construct
  source 1..54: mol_type = other DNA
tacctcatgaccataccactgaacggcaccccactccacgccttcccactgcca

SEQ ID NO: 16972 - DNA, 54 bp, synthetic construct
  source 1..54: mol_type = other DNA
tacctgatgataatcccaatcaacgggagtgcactccacatcttccccctcccg

SEQ ID NO: 16973 - DNA, 42 bp, synthetic construct
  source 1..42: mol_type = other DNA
tacctcatgacggtggtgctcggacacccattcccgctgaca

SEQ ID NO: 16974 - DNA, 3216 bp, synthetic construct
  source 1..3216: mol_type = other DNA
accgaaaactttaataacgatctgagcgataatggcctcaatgacaacacgttgagcgataatagtctcaacgaaaataccttgagtgataatactctctcagataaaagcctctccgagagcaccatcatacaaaatgaccacgataacctgaaggatacaaacaacaacgataataacaaggccctcaaggatccggcgaagacgtttacggacctccaaatggaaataattaatgcctctgatctgctcgaattgacggatgattacaagtacaataacgagacggataatataacgcttactatcagtaagagtaatttcgttattaatggtaacgggcataccatcgatggggacaaccaatgcggaatttttcaaattaacggaacgaatataacgctgaaaaatctcaacatcataaatgcgaacagtacaaaggactccgcccttcttctcaatccaggttccgaactcgaaaccaacaatgtcacttttatcaacgacagttctgataaacgcgtcattttcgccttcggtgctaagtacaccagtaacaacgacaagttcatagactgcacatcactcaatgatggtgttattaattcctatttgggcgaaatcaccatcaataacggatacttcgaatctagtaaacctctcgactgggcgttcgtgaattctctcggcaattctagcatctatgtccttaacactactttcgctaataccacatctaaatatgccaccgcgatcaagggggatcgcgagacagtcattcacgacagtaagttcattaacttgtatgcgaatctgaccgcgggcgcgatcggactcaaacgaatcgaggaggctgaaattgataactgcacatttataaacgtgtcaagtcaaaagaatgggggtgcgatcttcttggatatctacagtgactccgaagatgtccctataatgatttcccggtctagctttgtcaactgctacagtgagttcggaggagcaatccttagcctgggcggaaaaattacacttgaggaggataattttacgaataacggcgcgttttttgatgggggtgcgatttattcctcattctctcaactcacgataagccaaacaatattcgataacaactctgtggaactcgacgacgaccgggggagttttggcggtgcgatcttctccgatatctctgcattgattattcttaattgttcctttagcaacaacaatgcgcaaactggcggtgctctgtacacctacgactctggatattacatcgccaattctacttttaaagataataccaacaaagagagcgagttcgacgatattttcaccgatttcgacggggaaatcgcaacactggaaaacaattcctacagtggggaggattccatctgtcttaataacgaacgatacgaaagtgttatagccgttagcggaatgaactttactttgatcgagaatgagatcaatgtgaccaatcccccccggaagtttgaccttcgggaatggggctgggttacgcctgtgaagaaccaggggtatatgggcagctgttgggctttcggaacagttggagctatcgaaagttcaatccttagatttcttggactggagatggacatatccgagaataatatgcaagatagcctgcttcagtattaccgatatgggacgctcggcgcagaggaaggcggtgagtataatcttgggccgagttatgcgttgtcatggttcggggtttttccctctgaatatgatgtttatgatgagctggggaaaatatctgcaataatcgcgaccgacgattcaatacacctccaggatgctgtgttcgtgcctcctctcatgaattcaacagacaaagataaattgaagcagagtctgctcaagtacggcgcactggcagtttcctattacgcagaaacggacgaaccgggcctgaatgagaacacgagttcacaatattctctgaagaatgattctaaccatcgcgttctcctcgtgggttgggacgatgattattctaaagacaatttttacatgaccccacctggcgacggcgcatggatcattaagaactcttggggggaggagctgggagataaaggatattattacatctcctactacgacgcttctttcgcaacattggtccccagtgtgggttttccaataatgaataccgtcatctacaacaaaaactatcaatatgatatcggcggcacgctggaattcacagatatgggtaatgaatacgtgaacgaatttgaggccctggaagacgactttattgcggcggtcgggacgtactttatcgacgccggagtggattacaatattgagatctacgttaacgacgagctcaagtattcccaggacgggactagtcccttttttgggtttcacactatacaattggattcatatgtccccatcaaagaaggagacgagttcgatgtcaaaatcacgagcgattgcattccaattcttgagagtgggcggcaacactatatcgaaaataagtccgcagccaatctgaatggtgaatgggtcgatcttaccagtgatgggaaagtgtgtgccattaaagtttacacaacggacgaagacaaaaaaaaggagtcttccaggataaatactaggatagattgtaagaacatgaccacaacagcggttgcctccgaagatggaagaataggcgagtatttccaggtgactttgaaagatgagaacgggacggctctggctaataaaccaataaaaataggtttcaatggacgagtgtacgatagaacgacggacgagaatggatctgcaaaactccaaattaatctcgcttataaaggcacatacacgttcgccattgggtttttgggagacgaagaatatctgggtgcttttgaagtggccaaaatcaccgtgaaggttcagacgcccaagttgacagcgccgaacaaaagttataaagtgtccgccaaaaccaaatcactcactgccagctttaagactgcgaatggcaaagcggtcagtgggaaaaagatttcattcactgtcaatggcaagacttatagcgcgaaaacaaactccaaagggactgcgaccgtcaacgttagcctcaacaagaaagggacctattcatttaccgtgaagttcgcgggtgacgatacctttgcaacctcatcagctaaagcgaagcttactctgaag

SEQ ID NO: 16975 - DNA, 3906 bp, synthetic construct
  source 1..3906: mol_type = other DNA
tctgaaacaaaccttgattccattgagctgaacgatctggcggattcttctactgagatcgatgactctaccgatttgaatcaagattactccagtaatcaagatctttctttgaatcaaaatagcgactcaaatctgagtaacgaacaggaactttattccaataagctgtccgagaacagcttggactccaattcccagtcctccaatgaccttagcaatagcttgtacttgtctagtaacggggttcggctcgctgacctcaactcctcattcgctcagtttaacacgagtctgaacgattccaacacgatctatgttaactccagctacattggttctgacgaatttggtacccaatcaaatccttataaaacggtccttgcgggtattaatgctgccacgactgaccttaataatgtctacatcgcgaacggggtctataatatcaacaccactattacagttcttaagtcaattaacataatcggggaatctctgaatgttattctcaatgcctctaacgaaaataatatactctctgttaaaggttcttctgttgaagtctcaatattcaatctcacctttcggaatgggtatgctaataaggggggagcaatatacgtcgataagtcttctctcaacattatagggtcactttttgacagcaatatagcctatgttacatctgataatggctacggcggtgcaatttacaataatgcggggtttttgaagctttacaacactacttttaaaaacaacaaggtcgtggcagcatataacatagtgagcgaggggttcgggggggcgatctacaatgagcttggtgagatgacagtgctcaattcaaaattttacaataactcaatcgacatcaggaacattagcaagtcttcttacggggccggtggagctattttcaatcgggctggcttcgtgacaatctttaatagctccatctctaacaattcaatttacacgaattacagtctcggtggagctatatccatttgggcttctcgaaatgtttacatcatcaatagcaccattaacgacaacatcattagcggatcatatggctttgcttcagtcatcagcaataaagggacgctgttgcaaattgagaattctaccatatctaacaataacattaatgcttcttccgttgaaaatagtacaatttataatataaacgggaactttaaccttattaatagtaagatggaaaataataagatcaagactatcaaaacaaatttgttgatgtgtttggaagatcagctcattgttaactcatcatttaatctcgcgaacgaacttaaaggactcaacatgacatcccttccatcacattacgatttgagggaggagggcctcgtgacagccgtgaagaatcaaggaagttctggggcctgttgggcgtttgccttttactcagctatggagagttatctgttgaaggtggagaatataagttatgatttctcagaaaacaatatgaaaaattgcatgggtgatggtagtgaaaactctacggactgggatgacgggggggcctatgtcgtcgcacttgcttacctgttgaggtggtctggagcaataaatgaaacggacgatccttttaatgctagaagcaaggtcagtcccaccaatctgacccgagttaagtatctcacggacgcactgtacataccgcttcgcctcggggccttggataatgatcagattaagacggcgattcttaagtatggggctatctttgttccggtgtattccaatattataaaagcaaacagtaagagtggctactcagatattcaatacatatgcaaccatgcagtcgcaatcgtcggttgggatgacaactattccgctagcaactttaaagacacgccacccggagatggagcctttattataaaaaacagctggggaacgtcaggcggcgaacagggatattactacatttcttattacgacgccagttttgctgctagtatagaaacttcagccgcagtggcagtgaccaacgttgttaatacaaccggtgagtaccgcaataactattactacgacacattcggaaatacatttgagacgatcggttacaactctgatacaatctggtttgccaatcagtttaccgcgataagtgacaacccgttgaacgcatttggcctgtacacctacggtgactctacgtacacagttaatattacagttaataacaaatcagtctatactagcagtgggaaaattgtgggtgctggatttcatacaataaagctgagccgatatgtgcctctcacgaagggtgacacgttcaggattattgtcaagctcacaacgcctagtacattgttcccgcttgcggttgagaccaattactccggttttaccccacgcgccaagtctgactacaatcaatcttttatatctccagacggcaagacgtggtatgaccttaggaacagctccaataacagggcggtgaaattttacgaagatatgtatttttacacgctgaagaatgccagtgtctgtcttaaggcctatactgcctttgcggatgaactcgagttgaacctgagctccaacagcccgatatactatacgggtgatacgatcaagcttaacctgacggtgaccaacagaggagatcttgcaagtaactcttccattgcagtcccgctggacaaaagttatagtatagtgtcctataaaatctctgagaataacggcaacaaaagctatgacattcactacaacggcagctcttttaacatggcttccggcatatggtctatcccttaccttgaaaatgaggaatccgtctccctgatcctgagcctcaaaatgaattctaataacgacgttaatataaaggtctcagccaacagcagtagttgctccgttaaggataatgtttacgccaatatatctctcaagtacaaaattcctagcaagtttgcgaatattcccagtattaatacgaccgctcggtcctatggtttgcttaattttacgctcctggacataaataacaagcctctcgccaataaaaacgtcaatctcttgctgctgaagctggacgatgaagaggatgaggatctctctctgaatgataccaatctttattacagtgattcctccattagtaacgcatcagttatatctaacttgacgcttaaaacaaatgggaacggcattgtccagtataagcttaacctgacgcttggtgagtacctctttaaattggcgttcgatgaagacaaaaattaccaggcgtcagactacaactacagtttgaacataacaaaaagaaaaagtacgaaaatattgtgtaaggacatggtgacgtatagcgtcgtcgccgaagtggatggacgatccggtgagtattttaatgttacgctgactgattgcgatggctatgctatggccgataagtttatacagattggattcaacggccgcatatacaaccgaactacagattctgagggtaaggctaggcttcaaataaacctcaagaacccgaatgcgtatactttcgctatatgtttcctttctgatgatgactactacgctagctttgaggttgcaaagattactgtgaataaaaaaaagatgagtcttaatgtgcccaacaaggcttataaggcatccgaaaaaagtaaaatactgactgccaccttgattgaaaacaacaagaaaacagtcgctaacaaacttcttacgttcacggtggacggtaaaacgtatagcgctaagacgaacagcgccggggtggcctctgttaaggtcagcttgtcatccaagaagatatattctttcacggttaaatttgcgggggacgattgttatggtagtgcgactaaaagcgccaaagtgattattaaa

SEQ ID NO: 16976 - DNA, 5337 bp, synthetic construct
  source 1..5337: mol_type = other DNA
gctgatttgaataccgtccaaagcggggaggtcagcggaggggtggacatagccagcagcaacccgggtgtcgagaatggagagctgacctacgaaattcccgactccgtggagaacattcaatatgccggtcttttcgtcgatagctacacggcgggttcatccaatttggtgtatgggagcgaggccaacataacgttgacaaagaatggcgagagtgaacagatcgcgagcgaaagactggtcgcttcagtcggaagtgcagatggagaagtgtatgttatcaatgatcataccaccaaatgttttgctgactacatgatgacttacaatttgacagatcggctccaagacgcgaagggcaatattactatcacggtcaatgcaacaccaatagagggatacacattttacaataaaattaaacttataggtctggtttttacgtatgatgacggcgatggcgatcagttccactactgggtgaatgctgggtcatcttgggttaaaactgatagtggtgaaacatcaaaagcaaccttcaaactgggaaacgtgaattacgatcccacggtcgcgacacttgacaactttgctctttcttcacaggatggcgtgtatacattcaatggtaaagagatggacgagagcatagtgacagagacaggcgtctattattatatccatcacaagttcgacatactcgacaagatcaagaacatgacaaatacgctcgtgtacacgcctggagaggggtcttacagtttcagaaacgttctcagcgtcgtcaaactcgtcaaaactgtcccggtttatgctaaagtgaatatttcctccgaatatgacgatatcgtcttttcaggcaccgagaaccttctgaaggttggaataaccaacaatggaactgggtctgcaagctatttgcttgatttgtacgccgacggaaagaaagtgaacagttctcagatttccctcgccgcaggccgagaggcggtgatctctctgatcgataacactattcgaccttccgccgcagacactgtgagtggtgcggataataaaaagattaactacaccgtcgtcgtttctgataagaacacaggtgaggtgctcgacgaatcaagtatctttcctaatctcctctataacggctacctggggaagggccttgcctatcccgccgagaagataagtagcttcaaaaatatcacagtcaacggcggcatgatcattgaatcccttggggattctacatacctggacgccagtatgaccggaaagactgatagttggacaatcgatttgcctgatggcgcattctttacagacgcattcgtctacgtcccgtacaatctcgataatggcaatgtgccgatgtttaccagtaccttcaacggcgcagcggtgaatcccattgcgagctacagagatcagccaaatatcggtgaaaatgccaaaaatgggtatggcctgcttgtctatgatgtgggcgaattgattaaagcaggggttaactccttcgcactttccaaagaggccggtatagccggtgtctacccttctacactcatagcattctataacctgacggattcagacctcttgactagtgcgttcatattcaacggggccgacctgttgtcaaatgaatacaatagtctgggtagagacgtgagctcagataatattcttagtataggagcgttcgacgggctggtctccgccaagcttcacgtctttgcagcggattgccaagccggcgagggggacctgacagtcaacgggaagagttataaaaatgtgtgggcggggacaaaccgctccgtgggagattacgttgtcgacttggggaagtccactaatgcatccaatgaggtgtctttcatcagtactgcctctaacattcttgccctccaacagcttgcggtggttcagtataatgtgcccagtgtgaaggcttcacttgtttctgaatactccaatgccgtgttcgcgggaactaataacgtcttgtcactcaacataacgaacaatggaaagtttgacagcatttatacagttgatttctatgtggacggtaaaaagcaaaatagtacggaaatctcacttaaaagcggcgcgaacaagggcctctatctgatcgatgataccataaggccaatcgatgcttctaccgtcaacggtgcagacaacccgaaagtgaattatacagtcgtgataattgacaaagagaagtccatggtccttgatgagataaccatcactcccagtctcctctataatggtaatcttggtaaggacctggcttaccccgcagaaaatatcacttccttccgcaatatcactgtgtcaggtggggtcattgtcgatacgctggacgatagtacttatataaactcacaggccaccaataggactgacatctggaatgttaatgtggctgacggggatgttttcactgatgctttcgtttacgtgccatataactgggacaagacgaacggatacatgccagtctggaacgctaggtttaatggggtggcggtgtctccccttgttagttaccgagatcagtccaacatcgggttctttggaaaaaatggatatgggcttgtggtctacgatgtctcaaaactgatcaagagtggtgaaaacacattcacactcgaaaaagaggctggtataacggccgtttatcccagtacacttatggcattttacaatgccacttcatcaaactccctcaaaacaatttacatctacaacggggccgatcttttggctaacgaaaacaactttctgaacagaactgtggcctctgattctcacttggatataagtagctttaaggaggttattagtgcgaagctttatgtgttttccgccggagctcagaaaggtgagggtaatataattttcaataacaaaacatataaggacgtgtggaatggcacagtcaatagcgtggactcatttatcattgaccttggtaaaagccccagtgtgtccaacgacgtgtccttcgtcagcacgggcagtacgattatggctttgcagcaacttatagtgttggattactacgtgtcatccgttaaggcaaacgtgagcagcgaatattccggggcagtcttcgccggtaccgacaacgtcttgaaggtcgacctcacgaacgatgggcagggaggctctgtgtacgtcttggatttttacattgatggtaaaatagtgaactcaactgaaatacctctggacgcaggaaaatccacggagatatttctcgtggatgacaaaattcgaccagtggacgctagtacggtgaacggagcaaataatgccaaggtcaactacaccatcactgttactgacaaagcctccggtctggttctctatgaggcaagccttaatcctatagtcttgtacaacggcaatcttggaaaagatctggcatacccggcggaaaacataagctttttcgacgcgatcactgtgaatggaggcgtgatcatagatacacttgacgactctacttacctgggagctaagacgaccggcagaacagatgtttggaaagttgaaatcccgaaggatggtaaaatcgttgatggattcgtttatgtgtcttataattgggataagactaatgggagcatgcccatctggaacgtgagcttcaacggagttagtgtttcaccagtcgcgcattatagagatcagtctaatatgggtacctatggcaagtacgggtacggcctggttgtctatgacgttggggagttgatcaagagtgcggaaaataaattcactctggaaaaagagaatggaaccacagccgtctacccatctacactccttgcattttacaataggacggagtccaataaccgcacaacggtctatatgtataacggcgcagacctgctgagcaatgcgaataatttcctgggacggacagtggccagtaatgctgccctcgacctcgctctgaacccaaacgatgaaataaaatcatccagactctatgtttttgccgcaagcgggcaatctggtgagggtaaactgatagtgaataacaaaacattcaataacgtttacaacggtagcgctaatagtgttgatgcatatatcatagacttgggcaaatctccgtccgccagtaataacgttagtttcatagcaacagggtcaactatccttgccctgcagcaattcgtggtcgtggacgcaatacaccagagttctgaggaacttcaaaaaatgataaatagcgcaagggcggggagcacattgaaccttgggtctaatgtctttaaagacgtttctaacgttataattaataaagatctgactatcacggggggaaccatttacgcgagggagggcgagacgatctttgtcgtcaccgatcgaagtgcgggtggcccgaaagaagtgaacattacgggggtgaaattcgtcctcgataacgctaacacgatcttgcaagctagggcagtgaacgggagtacacctacgagcatcgacgtcgcaagtataaatatcaagaaaaacaacatatcctttgttgatgacgatgttgttcccgagagtatcacagtgctggacctcaaaagtcaacgctccagcattgcaccaacacggaacctcaccatctccggtaataacttgatagccggaatctgccccttcatgtttgaggttacttcattcaatgggaaagactcagttgtggtgccagagggaggaaatatcccagataaaaaggcgagtgtcatacactatgaagacatggtcaccaccgcaattaacacaaacatagaagggcgggtggggaaatattttgaggttaatcttacagattcaaatggtaaccctcttaaggataaaaaagttcaaatagggtttaacggcgtggtttatgaccgcaccactaacgcgaccgggggcgttaaactgcagattaaccttggatacaaaggaacatatactttcgctattgcattcctgggcgatgactactacaatggaagtttcgttgtcgcgaaaataaaagtgaatactcagaagactaaaatcagcacctcttccaaaacgtacaaagcttcagctaagacgaaggcgatatcagcaaccctcaaggacgcgtctagcaatcccatttcaggcaagaagctcagtttcaccgtgaacggcaaaacgtatagcgcgactactaatagtaaaggtactgctacagtcaatgtctcccttagcaagaaaggaacctacagttttacggtgaagtatgcaggagatgacatgtacgctggtgcgactagttccagtaaggtcgttataaaa

SEQ ID NO: 16977 - DNA, 3897 bp, synthetic construct
  source 1..3897: mol_type = other DNA
aacgacgatatccttaatatcaatgtcaccgacactcaagattccgttattgataactctaacgggatttcagattatttttcttctgacaacgggataatcaacgacgacgggttgagtagtgatgacgagacagccgggtcccagcttcttaatgactctgaagatcttgattcttccgatgatctcgccaaagactctgatttggaagattcaaaggagacgagcaaaacacaagataactctcagaaaaatgaagactctaagacaagactttcagactcatcaattatccgcatcactgatagtagctactcatcttattttgatctttccaaggatggtgctattagagaggggacgataaaggacggggatacgctgctcataggaaatgtgtccggcaaaatattcagcataacgaagaacattaatatccttcccatttctgacggtgatacgatgagtaactgccttattcggttgatagaagggagctccggaactagcttgtccaatttgcgcattgttaataggaacgaaaaagtcggatctttttacctgtgtgggattcacattattaattccgcagggcacgatatcgtgaacctgacgatcaacaacagtcaaatgaaatgttatggaattataatgagcaatgccagcaataaccgaatcataaactcaacgatcattactggccaggcgacagctatacctatgacgggaagcagtaataaccttttttacgggaattacatagagacgtacaacacaaatatgatctactattgtatgtatggtaacggagacttttacccgcgggaggatttggagaaatcacacgacaatattattgctaataattactttacctcacgaaacgggacgtatgacagttattgttactccgtgtgtctcatggcagaggctggaggttctggaacagtgattgccaacaataccttcaacaatacctttcgcccgataacagtttccactccggacactcttgtgataaacaacaccatccttaacgtggggggggaagccggcataatcgtggatggcaacaacgtgacgataatgaataacaatatcagcactaagaggctggagggcttccaatggaacaaggaaggtgacgtggtgggaatctttacctatggcagcaatactcggataatcggaaacagcatcgataccgttggtaccaacggtattcgatctagcggcgatgctacatttatatctgggaatactatcaacactgagtcatctgcttgcataaacctcacgaagtcaaatgcagtggttgaggacaacgccctgaacggcatagggtcttctgctgtgcggatttatactagtaagcttgtggaaaacacaacgattaggaacaataacatatcaagtgactcagagggaatagtgctcaagggtaagatagattattcactcgtctgtggcaatatcattgaaataagcaatcctgaagacgcgattatagttggaaaatatacaaaccggaatccacttgtcccccagcattatgctattttcaataataccataaatgggatagttgtgaatttgacagacatctctgagatagagcgaaacgacacagattccgggttgaataatacaaacacctcagactccggcaataatggcacgggcaatacaggtaacggcaccaatatcactgacgttaacgggaccgacattaacggtacagacgttaacggaacgaatataacggatatcaacggtacggacgttaacggtactaacgtgaccgatgtcaatggcactgatgtcaacgggactgacgttaatggtactgatataaatggaacaggcaacgccactattccggtgaatataaccaaactgagtacatccatcacagtctacaatacaacggtcttgcgaggcgactacctggatgcctatttgaaagatcaatacggcaatccgattagtggggtgtcaatagatttccatttcaaggacaaagtttacgctaaaacaacggactctgaaggaaaggccagcttgcacttcgatgcgatccctgataactatacaatgaatataagctttacgggtaacaattactatttgtcttcaaatatcactatcgatatcagcgtgatacctgtttcatattacctgaatgagagtaatttttacgaatatttcggagaagatggttaccttaaaggagattatgaatatgcggacctgatcttccagggtgatttccggaataaacggatagtgctgaatcaaccactcaggattattagcgatagcgcggttttgtacgacagcattatcaaaatagagtccgataaggttgtcgttgatggtttcacgatcgttaatagaaaccccggaaacaagcaagacaatcacaggtttgcgatcctgttggactatgttagggatgtttcagtcattaacaataagatcaaactcgattcctatgatagtggctatggtatttacctgtctgagactcaagacagtactgtgtcaaacaactccatagatgtcaaagccgacaaattgaccttcggtataatactttacgacagtaaggacaacctcattcaggataatataataaaagtcaatggaaccgacgatccccatcagtacgaatccactattcaggtggacacgagcatttccgtggacgactacgaagcggagggaatgataatcccagaggtttacaaaacgtatggtataattcttttctatagttcatcaaacgatatcggctataacgtcattaacgccacctccggccttaagaaatattacactgctgtcaaggaaagtaccaactctattgtgggcgttgacctgtattatgatagtaattacaacaaagtccatcataataacgtcgtggtctctgcgaaggatccttacctctacgggctgggagttcttggcgccgagactgggaagcgagatcaatttgccaccaataactcctttaccgataatattgtgtttgtcaacgggacttattatgctgctggaataatagcggggtacaactcaatcaacaccacgatacttcgcaattatatcatatgcttctccaataacgtttcctatggcgtgatactcgagggggctctgaactctgtggttgatagtaactatgtgatcagccggtctcgaattaactatgtccttgaggggtatgacaccgattataacttgattagcaataatacattgaacgccttcggccagtatgtgggtgatgtttctctctacaacagtaaacataattacatcgcggggaacaaactttccccaattttccgggaggggagacttaaagacgcatctgaactccccggaggcgtcgattttgacgccatattttccgagctcggggttagtaaccctctccatgactatagtgataaagactggtctgagctgcttcgcaccgaccttacagaccatgctgacgttattccacctcataccggcgctttctacgacgacggcggagagggaaatatttttgtcgacaatgaagttccggcccccccttctggggggaatggccagaccaatcgaacaggatccggtgagacaaactcaaatggcaacggtaactcttcaaatggtagccagaactcaaactcaaattcaacggtcgttaataacaataatggaaattccggttctcaaagtgacatggatggcagtggtaacaacccggaaacggacacccttaagggcaacacggtcggcacatcatccagcgcagctgttacagaatccgcccgggcttacaatctcgacgtggacgaggacgcggcatcctcacggagtttgtcctttgggggtatgaac

SEQ ID NO: 16978 - DNA, 5430 bp, synthetic construct
  source 1..5430: mol_type = other DNA
ggagacgtcgacgatctctccgacgcgggcaattacactagagacaattcccccctcacgatatcaagtacttatcaaagctccacttacggctctgatggggggtacgatgataagaatgagaatatttatatacttgataaggtgtccgatggtgataaatccaaaacatgttgtagcaaggatttgagtctggacaatgcttgctcaatggataaatcttcatgttctaaaagtaattcagcgtgctccaaaggcattagttcagacaaagattcatctaatctgtccaatacgtatctggtctcagagaacaattacaatgatttcaacgtcgacatagacttgaatgacaaacttagtgacctcgatctgaacaatgaccttagtttgaataaggatttgacacttaaccttaatagcaacaatgacatggactatctgaaccttgaagaggttatacagaccgacggcacgctcacctatgaaggggatttggaccagacctatttgaacgacgagagtttgaaccaggatgttcagaatgatgatagcctcaataagaatgatctcaaatctccacttagcgacgagaatactttcaacatatttattatttcagataacacaggaaacaacctttttgacgccgttgcctgcgaaatcctcgataactctaatttttccaacgtgaaattcaacatacgatcaggcaatcaaattaacgcgatgtcagaggatgaaatttacgagttgatggccccgtgtgacgctttcataggacagtgggtttcctcaaatgtggacgccgtccttacctctctgttgaacaaccatccggaactgtcaaataagaagttgttcctgatacttgaaccaccaaccggcaatataaacagcagttcttctagtctgaacttggttcggaacagtaccatagattataagaagatattcaatgggatttcaaacgacgatctgattaactattttaaggccactaagcgcggaaacaatttcgaaagtatccaagagtatatagacaatgaaggatcatctttcaattccattttcaacaaccttgttctctacaaggacatcaacgacaaagcgaatctgaagaatgaactcctgtatattctttaccttttgggccacggatgttcatatgaatccgccaacttcacgggggttcaggcaagtggtatattccgagatagatggtactccttcgacgagtatgtccttaccttttttaacgaatcccgcaatcgaacaataggaatacttgagtccacgatgtatatacagagtcaacagctcgacctcgtcaatgagataaccgaaaggcttgaaagcaagggttataatgtgatccctatatactgtccagccggaaatgccgagcagttgaacataatggttaaatattggacgtctgcatgtagtaacatcagtgggtttctggagaacccccaggactttgacatttatgtcgacggaataatctctatggtggcatatggcgtcggaggtgagaattttaccaatgctacaaagttctttgaagatgccaatgtgcctatatttcgggccgtgcattcagaatatatcactaatgagcaatgggaattgtccccggtcggactctctaccacaaagagtgataaatggtggcacgtgaccattgccgagtcccaagggatattcgatgcaacgtatgtcgggggggtggacagttatatttcaaatcgcacgggtgccatcattcttacatttgtcccagttcacgagaacatcgaactccttacagatcgggtggatgcgtgggtggatcttaaatacacgcccaacgaagacaaaaatatctccatcgtgtattataactaccccccgggtaaacagaacattggggcatcctatctggacgcgatcacctctgtttacaatatgctctatacgttgaaagacgagggctattacttgactgacctgcctaataacgtctcagagcttgaggatatgatgattgcttgcggcataaatgtcgccaattgggctcccggggaggtggagaagctggccaacaggtcaggtgttgccctcctccccgtcgatgaatatctggagtggtttgacagccttgacgacattgtcaaggtgcaaataaccgaaggcccagtggcatacataggacaaatggttcgcagggccgtccttataaactatacggacgaggttgagacaatggtgaacgactggtataaccaaatcaaggcactccttcctgaaaatcaaacagttgccgctacgaacatattggacaaacttgttaacagtctcaagctttatgccaatgcctcatcagatggtgacgaaaacgcaagcctgtattacgacgaattcctgagatactacgacgaattcaaatctcttaacgtctccggtcttaatggatggggggaggcgccaggaaatatcatgctggtgaatcgaaatggaacggactacttcgtcatccccggactcaccttcggcaatgtgtttattgggcctgagccccaacgcgggtgggaggcagatatagaaaacctgtaccactgtacggccgttgcacccactcaccaatacttggcagcatattattatatgcaaacaagacagagtaacgcgatggtgttcgtggggcgacacgccactcatgagtggcttccgggaaaggaagtgctgctctcttataacgattatggtagcattgtcgttggtaaagtcccccaagtttacttctatataacggatggtcttgctgaagccattcaggccaagcggagaggcttcgcggttctgatttcccatctcgactcacccaagtcatatacgcatctgtacgggaacctcaccgtgttggctacacttctcgaggaatatgataacaaccatatcataatagaatccgactctgacaaggataatcaagctataacatatcaagtcattaaagacaatcagacgataacataccaggttatcaaccaggaactggaagataacctcacccgggcgataaaagatctcgttattgcgaataattactacttgactattgggtttaccgcggaagaactcaacaatacagatatgttctcactctcttccactctcaatgcttttctcaagaacacgcaaaacacactgtacccgctgggattgcacgctattggccagaaatggacggacgaagatctcgcgaataccgttgctatcatagtttcccacgattttgagtacggcggtaaaaagacgaatctcttcgaccagctttctctttactattacggggagaagtacagtaatctgacaccgttgaagagagactatatattgaacaggtctgttgacgtgtgtaaggcgttgatctactgggacaccgaaacagtgagcgacacaatagggattggttctcccgagtttatagagtctctcaacattgcaaaaaaatatatcgacctgtacaaccagtgtatttcattggagctcgaagaaatggtgtccgcccttaacggaggttatgtccccgtcaatataggtggagaatccgttacagttccacaggtgctccccacgggcgctaatatgtaccaggatcaatcaagcgagttgccaacacagaaagcgtgggactatgccaagacactgtcattgttgacgcttgccgaccttaatgacactacagagaagataattatgggcatctggtgcgtcgagacggctcgggacgatggtgcccttgtcagcactgtcctttaccttcttggtatggaaccggtgtggcataacagtagtagcgccggtttcgatgaagaggggataccaacgggaaagaaagttgaggatctcccaaatgttatagcgctcgagaatctcacgcgacccgatggatgggctaaaaaacgaatcgacgtcaccgtcataacatcaggcctttttcgggatctttattcaagccaagccaggttgatggacaatgcatatagaatggctcttgcgtgcagttattatacgatagtcaacaacaagacaatcatggatagtgaatacggtccacaagtctatgacgctctgcgcagcattatgcggtccatttcctttaaagggatgtccaatgaatctctcgaagacaactatgtggcgaaacattggctggaagactgcatttactacctcagtcttggctataacagcacggtttcaggcgagtatgcgattacgcggatctttgctccccctaacggcgattacggagctggcatatctaagctggttagtatgtcatggacttggaatgacaccgacgaattgtcagaattttatatcggcaggatgggcaacatgtattctaaatattattggggtgacacgaacccggtggtctttatgagagccttgagtgacacggaccatatcgtggtttccagaaatactaaccaatacggggtgcttgacaacgacgatttctttgactattgggggggcctttctatgacagtggagtacttgtctaataagacacccactatgaatgtgttgatgtatgccaataaagataatgcttacgtggccaccttcgagaatgtcttctacaacgagctgaacacaagatatctgaatccggagtggataaaaggtatgatgcaagaggggtatagtggatcacgctatatgtccaacaaatttatttccaacctttggggatggcaggtgacgagaccgagctccgtgtccgagacagtctgggacgatgtgtataacacttactacaaagacaaatatggtctgggagttaaaagctggctccaatccggaaacaatgcgtacagtctgatttccatgagcggcacaatgctgaactccgcatactcaggttactgggatgcggatgacgccacactgtctgacatagccaatacttgggcacaggcaacggttgcgaatggtgttgcgtgttgtgactgttcctgtggtaacgtcgccatgatgcaatgggcgttcaagtacgttaacgctgatttgttggcaaaattgatgccgaagttgtatgacgccactcagaaccctctgttctacactaactctagtgatatgcctacgaatagttccaatattgaccgacgcacgaccaattccagtgcagagagtaacaatacagaaacagtgcaaaccaatagctcaagtaactcacaacaatccgccaacgggaacaccaatattccaggggcctccggaggttacatggttggtactgaggccgatgctcaatcagacatggctagtgacagcgatgccggaatgaatgacgccaacggcgaaggacgaagcgttgaggttaccaaatcaacgtccacaccagttgctccaaaagacgtgagcatg

SEQ ID NO: 16979 - DNA, 1155 bp, synthetic construct
  source 1..1155: mol_type = other DNA
gggtccataggggctgcttctatggagttctgttttgatgttttcaaggaactgaaggttcaccatgctaacgagaacatcttttactgtccaatagccatcatgagtgcgcttgctatggtttatttgggtgcaaaagattctactcgcactcagattaataaggtcgttagattcgacaagcttccagggtttggagacagtattgaggcccaatgtggaacgtcagtcaacgtccattcttctctgcgggacattctcaaccaaataacgaagccaaacgacgtgtattccttctcactcgcgtcacggctgtatgctgaagaaaggtatcctatcttgccagaatatctccagtgcgtcaaggagttgtatcgaggcggactggaaccgatcaactttcagactgcagccgaccaggcccgcgaactgatcaacagctgggtcgagtctcagaccaatgggatcatacgcaatgtgttgcaaccgagtagtgtcgactctcagacggctatggtcttggtgaacgctatagtcttcaaaggtctgtgggagaagaccttcaaggatgaagacacacaagcgatgccattcagagtcaccgaacaagaaagcaaacccgtccaaatgatgtaccaaattgggctttttcgggtggcctctatggcctctgagaaaatgaaaatattggaactgcccttcgccagcggcacaatgagtatgttggtccttcttccagatgaagtctcaggtctcgaacagcttgagtctatcattaactttgagaaactcactgaatggacttcttccaatgtgatggaagaacgaaaaatcaaagtctacctgccccgaatgaagatggaagagaaatataatttgacatcagttctgatggccatgggaatcacagacgtgttttcatcctctgcgaatctgtctggcatatcttccgcagaatctctcaagatcagtcaagccgtccacgcggcccatgctgagataaatgaggcgggcagagaggtggtggggtccgccgaagctggagtcgacgcagcttctgtcagtgaagaatttagggccgatcatcctttcctgttctgcataaagcacatagctacgaacgctgtgcttttctttggcagatgcgtttctcca

SEQ ID NO: 16980 - DNA, 48 bp, synthetic construct; identical to SEQ ID NO: 16964
  source 1..48: mol_type = other DNA

SEQ ID NO: 16981 - DNA, 189 bp, synthetic construct
  source 1..189: mol_type = other DNA
ccctggtacatctggctgggcttcatcgcaggactgatcgccatcgtcatggtcaccataatgctctgttgcatgacctcctgctgtagctgcctgaaaggctgttgcagctgcgggagctgctgcaaattcgacgaagacgatagcgaacctgtgctcaaaggggtgaagttgcattacacatagtga

SEQ ID NO: 16982 - RNA, 47 nt, synthetic construct; identical to SEQ ID NO: 16965
  source 1..47: mol_type = other RNA

SEQ ID NO: 16983 - RNA, 93 nt, synthetic construct; identical to SEQ ID NO: 16966
  source 1..93: mol_type = other RNA

SEQ ID NO: 16984 - RNA, 48 nt, synthetic construct
  source 1..48: mol_type = other RNA
atgttcgtgttcctcgtgctcctgcccctcgtctccagccagtgcgtg

SEQ ID NO: 16985 - RNA, 189 nt, synthetic construct
  source 1..189: mol_type = other RNA
ccctggtacatctggctgggcttcatcgcaggactgatcgccatcgtcatggtcaccataatgctctgttgcatgacctcctgctgtagctgcctgaaaggctgttgcagctgcgggagctgctgcaaattcgacgaagacgatagcgaacctgtgctcaaaggggtgaagttgcattacacatagtga

SEQ ID NO: 16986 - RNA, 47 nt, synthetic construct; identical to SEQ ID NO: 16965
  source 1..47: mol_type = other RNA

SEQ ID NO: 16987 - RNA, 93 nt, synthetic construct; identical to SEQ ID NO: 16966
  source 1..93: mol_type = other RNA

SEQ ID NO: 16988 - RNA, 120 nt, synthetic construct
  source 1..120: mol_type = other RNA
aaaaaaaaaaaaaaaaaaaaaaaaaaaaaaaaaaaaaaaaaaaaaaaaaaaaaaaaaaaaaaaaaaaaaaaaaaaaaaaaaaaaaaaaaaaaaaaaaaaaaaaaaaaaaaaaaaaaaaaa

SEQ ID NO: 16989 - RNA, 48 nt, synthetic construct; identical to SEQ ID NO: 16984
  source 1..48: mol_type = other RNA

SEQ ID NO: 16990 - RNA, 189 nt, synthetic construct; identical to SEQ ID NO: 16985
  source 1..189: mol_type = other RNA

SEQ ID NO: 16991 - DNA, 75 bp, synthetic construct
  source 1..75: mol_type = other DNA
ccctggtacatctggctgggcttcatcgcaggactgatcgccatcgtcatggtcaccataatgctctgttgcatg

SEQ ID NO: 16992 - DNA, 108 bp, synthetic construct
  source 1..108: mol_type = other DNA
acctcctgctgtagctgcctgaaaggctgttgcagctgcgggagctgctgcaaattcgacgaagacgatagcgaacctgtgctcaaaggggtgaagttgcattacaca

SEQ ID NO: 16993 - RNA, 80 nt, synthetic construct
  source 1..80: mol_type = other RNA
aaaaaaaaaaaaaaaaaaaaaaaaaaaaaaaaaaaaaaaaaaaaaaaaaaaaaaaaaaaaaaaaaaaaaaaaaaaaaaaa

SEQ ID NO: 16994 - RNA, 160 nt, synthetic construct
  source 1..160: mol_type = other RNA
aaaaaaaaaaaaaaaaaaaaaaaaaaaaaaaaaaaaaaaaaaaaaaaaaaaaaaaaaaaaaaaaaaaaaaaaaaaaaaaaaaaaaaaaaaaaaaaaaaaaaaaaaaaaaaaaaaaaaaaaaaaaaaaaaaaaaaaaaaaaaaaaaaaaaaaaaaaaaaaa

SEQ ID NO: 16995 - RNA, 20 nt, synthetic construct
  source 1..20: mol_type = other RNA
aaaaaaaaaaaaaaaaaaaa

SEQ ID NO: 16996 - RNA, 40 nt, synthetic construct
  source 1..40: mol_type = other RNA
aaaaaaaaaaaaaaaaaaaaaaaaaaaaaaaaaaaaaaaa

SEQ ID NO: 16997 - RNA, 100 nt, synthetic construct
  source 1..100: mol_type = other RNA
aaaaaaaaaaaaaaaaaaaaaaaaaaaaaaaaaaaaaaaaaaaaaaaaaaaaaaaaaaaaaaaaaaaaaaaaaaaaaaaaaaaaaaaaaaaaaaaaaaaa

SEQ ID NO: 16998 - RNA, 140 nt, synthetic construct
  source 1..140: mol_type = other RNA
aaaaaaaaaaaaaaaaaaaaaaaaaaaaaaaaaaaaaaaaaaaaaaaaaaaaaaaaaaaaaaaaaaaaaaaaaaaaaaaaaaaaaaaaaaaaaaaaaaaaaaaaaaaaaaaaaaaaaaaaaaaaaaaaaaaaaaaaaaaa
